United States Patent Application Publication US 2026/0191916 A1 - sequence listing, part 96

SEQ ID NO: 619 - DNA, 1367898 bp, Phocaeicola vulgatus
  source 1..1367898: mol_type = genomic DNA
ttcaaaagcagtatatgataccattaaattaccgaataaaattttgctgtacaaccctaatattaatgataaaggttttaaaggtcgtaaaaataaagacaaatttgtagtggcagcgatgggaagtcttatcaagataaaaggatttgaatattatattaaggctgctgataaagtttcggaaaaacttcctgttgaatttagattatatggtgaaggacctctacatgatactttggaaacattatcaaatggtaaagtgaaatttatgggatttagcgaaaatataatgaatgaactgtatgaatctattgatattgtagttgtgccgactattattcctgaagctttgccattagtgcttgttgaagctaagagtgtaggactacctgcaatagtaactaatcttggtggtcaagcagaaattataaggaatggtattgacgggttccttgttcctgttggagattctttaagcataaagcaatatattgaaatgatggttaaggatagagttttatataataagctggcggaagaatcttatcagagtgtttctctttttgattacgatttatttaaatctactattttgaaaatctttattgtatgaaagtagcgattattcaagaatggttagtaaccgttggaggttccgacaaagtagtcaaagctatagctgatgtgtttccaaatgcagatatatttacgttagtagccaagaaagaagtctgtgatgaattaggaattgattggaaaaaagtacatacatcttttattcaaaagatgcctttggggacaaagaagcatcgggcttatcttccattgtttccttttgcaatagaacaatttgatttgcggggatatgatgtgattatatcttcaagtcacgcggtggcaaaaggagtactgacaaaagccgaccagttacatatttgttattgtcattctccagttcgttatgtatgggatatgtataacgaatatttggaagaagcaaatttggctgaaggattcaagagctggcttgtaaggtatatgctacacaatatcaggaagtgggatatgctttccagctttcgtgtggattattttatcagtaattcagattatgtgggaaggcgcatcaaagaaacttatcgcaggaactctgtgacgattcaccctaatattgatatttctaactttgaatattgcaatgataaacagaattactatttagcgagtagcagacttgtagcatataagaagatagacatcatcattgaagccttcaataggatgcccgataagaaattgatcgtgattggaggaggaccgaatttgaagaattataaagaattggccaatgaaaatattacagtgatgggttatcaaccttttaatttgctgaaagagaagatgcaacatgccaaagcttttatttttgcagcagatgaagatttcggtatgattcctatagaggctgaagcctgtggtactcctgtgatagcttatggacatggaggttcattggaaacggtctgtgatggaaaaaccggaatgtttttttatgagcagacggccgatgccatagtaaatgcagtgaaagagtttgaaacgatggggagtgctcctttcaaatatgaggattgccgtagttgggcagaaagattttcagaggaacggtttaaaagggaaataaaagaatttgtagaggagaaatataaagaatttaataaataattgagtatgaactattttataacaggtgggactggctttataggtactcacctgaccaaccttctccaagaattgcaccctgaatgtaatgtatataatcttgatatagtagagccgggtacaccgttgcctagtgtggaggattataagcctgcattgcgcaaggggcaaaaattggcttcaacattcattcgctgtgatgttcgcaagcctattgtgcttgaaggggtaaatgttacggctgatgatgttatctttaattttgctgccgtacatcgtactccgggacatcctgattatgcctactttgaaacaaatgttcttggtgcagagaatgtgacggcttttgcggaaaagtatggaataaagaaaattgtattcacttcctccattgctccatatggtgcagcggaagaattgaaggaagaaactacagttcctactcctaatactccttatggaatatcaaaattggttgctgaaaagattcacatgatttggcaagctaggaatcaggcagaaagacaattgacgatcgttcgtccgggtgtggtattcggtaaaggggaaaatggaaacttcactcgtctttattggggaatacgtggcggaaaatttatatatcccggaagaaaggatactgtaaaggcatgtatttatgtgaaggagttagtccgttttatgctatatagattggaacatcatgaacagggagtggaattatataactgcacttttgagccggcttatactattgaacagatagtggaaacaatgaagaaagtgacagatttgaaaaaggtggtaccattgatacccgcatgggtgctgatgccggttgccacagtaattggttgtttgggcgcacccatgggaatttgtcctgcccgtgtgaaaaaactgatgatatctacgaatatttgtgggaaaaagctttcagcttcaggatacaaattccattattcttttgaggaagcgatagctgattggtataaagataatgacaatctttatctgaaataaattaaatgagaaaaatacttcttattcttgtcgggacattagtctatatgagtttatacgcccagtttacaacaggaacaacaggactcctcaatatgcctacagccgaaatgcagcgtgacaaaacatttatgtttggtggtggatttttggaaaaacatgccacaccagcacgatggacatacaatactttgaactactatatcaatatcactctttttccatggctggaggtagcttacgattgtacacttcataaggctatgaaatgcgatcctgtttatgggtgtggattctgggttccgtccacgtatggcaagttcgtaaatcaggatagaaacttttctgttcgcttacgtttattgaaagagggacaatggtggaaatatatgccggcaattgttattggttccaatgatgttacgacacgccccggtgatgacagtagtacaaacttttcaaatccgaaggggacaggtaatggattttggaaccgctatttcattgtcgcaactaaacatttggcatttaagaatatgggagagctaggtgttcatttagcatatgtttataacaggcggaaggactatccgttaaatggtcccgctatcggtgccaatttccgattctctctgtccccgatttcctttatcaacaaagcggtaaataacttgaatctgatggcagaatatgatagcaaatcgataaattgtggttttgagtacagcttctggaaagactacatcaacgccgtagtagagttgaaccgctataaatatttttccggcggtttggtcttcaaacttcatttgaaataactttttgaaaaaaaatacccatgtcgattctatttcaacaagactttgataacatacatgtttcattttatcgcaacatgaagtctcatgttgtagaaaagatgatcataagtcgggtgatgagaggcatttgcagtgattattataaggatgtggtacatggtttattaaaccgtcaggaaaatacagtttttcctaatatctatcgtgatgttattaagaatgaaataaaggaagaatggaaattgcctgaagaacttgtggagcaattggctaaaagccgttttgaacagcgggaaagtatattattcaattatgtattgtttgctttgtggaggatttaataggtcttttatgaagcatatccgttgtttgggatatgcttctattgtgagatacagttaaaagaggattgtgagagattaaaaaaaatcctttgttcaaactttctttttctaagttggtagaaagatagatggattgaaatagtcagaaaggaaaactaccttatatatagatggccacggtacctccaaatattgttttctgaaccatccccatcgtttcggcaagtcgttgctgacctcctgctgcatagctatttagccgggaaaaaagacctttttaaaggacttgccattgaaaaaactacggaatacttggtgctgcgctttatcccaaataaatcagaagaactatcctctaaacaaagaggcggactgcgtgctggttggatgtttatgttgggtgttgaagaaataaagggtaaaaggatatacttgctttttgtttctgattttttttgttatctttacaaaaagctatttgtgatgatgaagcaaaaagaagaaatattatatgcaattaaggaagtcatagcgcaggttatgcctacaggtgcaagagtggtacttttgggttctcaggttcgtaacgatgcccgcgaggattcggattgggatatattgattcttcttgataaagaaaaattagaagaagcagatcacgataagtatgtttatcctttatttgaattggactggaaaattgatgtggagattcatcctataatgtatactttaaaagattggctgaaacgaaatttttctctcttttataaaaatgtggaacaagacgggattgtactatgctgagtgttgatgagaaaaaagcgattataaattatcggatacaaaagtcttacggtaatttgaacgaggcaaaagaagttgcgaaattgggcttttggaacttggtaggtaaccgcttttattatttggcatttcatatggcttctgcattattgttggataagggtcttgcatcttgttttcacagtggtatgattcacttgataggtactcggtttgtagtaaaaggtcttttagataaaagttatggtcgtttgctgtcccgtttatttgaattacggcaatctggcgattatgatgatttgtatgatgcaacagaggatgaggtcataccttatattgacaagacatttcaatttattcaagatatggaaaagctaatcgtattcaagggcgaatagttattctgtagtttgttgttagcatctaaaaaaaacgtaaaaagccatctcccgtgtgaaatggaacatggcgtgcaatcacttttggggaatgtatgtgggccgaacgctttgttctctgcggacttctcgtgatgaagataggtttaaactttgactcggaaaaccatactttgagtgattggatcatagaagaatagacgatattataagctctttgtaaagataaaatatttataatttatataggctgtatgcgataacgtatgcggccttccttgtttttgttgtcggtagcgactggcatccgtataatgtattgcaagaacgattgtcttcgtgactaccagcaggagatgaagctcaggctctttgaagagtgggagcttcaccggagtgtgatggtacagatgcctacaggcacgggaaagacacacctgctggctgccatagtgagggagttcttgtgtggttccggtagccgggtatggattgtggcgcatcgtcgggaactggtggagcagatagaggagacggtttcccgttatggaatggggagggaggacggaagtgtgagggtgatgtccatccagtggttgtcacgaaaccggaagattgtgaacggacagccggatttgattgttattgacgaggcacatcatgccctggcagaaacttatcgggagctttggaagagttatccggaggcgaggaaattgggtatgaccgctaccccctgtcggctgaaccgcaaaggattcacggatttgtttgataccctgattacctcatggagtattgcggaatttatcgggaggggctggttgtcgtcctttgactatgtgtccatccgtgcgaacagcagggaacagcggctggttgactcgttgaagaagcggggtgcggacggggattaccaggtgaaggaaatgaatgcggtgctgaaccgggaaaccggtatccgccaattgtatgagagcgtccgtcgatatgccgctgggaagaaagggatagtctatgccgtgagcatcgcacacgcccgacagattgcggcttattacagcctgcatggcgtggagtctgttgctatcgacagcaggacccccgctctggaacgcaaggaactggtagaggatttcaggcggggaaagatcagcgtgttggtcaatgtggatattttttccgaaggttttgactgtcccgatgtggagttcgtgcagctggcacgtcccacgctttcgttggcgaaatacctgcaacaggtgggacgggggctgcggaagtcggataataaggaatcatgtatgctgatagataatgtgggcttgcaccggatattcggtctgcctgtccgtgaccgtgactgggaggcgatgttcgaaggacggatggcgggaaatgctcagccctggacacggatggagaacagcgggctgtctgtgtcttgctctctatcggaagatagcaaacagaatgaaggactggaaattgtgatgacacacaactgtctgctggatgctattcggaaaggggatttgatttgtttgggaggaggtggtccggtcggtggggagcaacggactgctttgaaagcctgtcatgaccggcagagtggtttgtggggcttgaggtgcgggaacaaaatcacagtgattcctcaataccgggaagtatttgatatttgtgcaaaccgggctgctgtccgttttgaggacggccggacaggagtggtggatgattccggaactcccctgatggtaacagaccgctgccggagattgagattcctgaagggagaacttctttctgtcaccaaagaggatgggagtgactgttataccgatttgaagacaaacagaacttatcaggagaggccggtggttttttcatacggcggcatagagctgctgcgggtgggggagactttccatagccgcacgcggaaggcgtatgcctctatgcatggtttgcacaaagacagtctttgtttttatggtttctacttgaagataccggattaccgtgttccgaagtcttgccggctagttaatcctgtgtggtctactatatttgatgtcttcgcctgcgtgctggaaggggatgatgaagaggtgtactggtgttgtggttgtttggcggatcggagcattgtggtgatggacggggaaggaaactattatcatgtggagaaaggaaaggggaagcggtatatagcttgtaatgctcctaaggcgggcgaggcggattttgcctccgtggtggaaggtctgaggaaggaagccgggcggcgtgcggagagcgtacagcgggaacggcaacagaatgaggaagagaaaaggcggaagaggctggaggaaataaaagatgtccttcctttccggatggggatgaagtgggggctgaaatggggagatcgtatcgtagtgcctccttgttaccggaatatctgtattcctgtaggcggttattgtgcttttgaagggaatgcctgccagtggggggtgatggcactggatggaaaagtggtggtggaggccagatatcagaaggtggagatagaaaaggatggaacggtgcatctgaccatcattccgggtaaggtaaagaccatcaaactttgacggatattgaattgtttgggtatggagtgggtaaatttcagtatatcacgggtgtttgatgaggagagcaattagtgtaaaatagtttttacgccttgatgttataatctttacataaaagaaaacaattctaccgttgaagctcttacgtgggataccgctttcaagaacataaacgaaccaagcggatgggccatgaaagggatacatgaagaagcctactaataaatccggcatcaattgacataacaaaatcggataactgaaaaattatccgcttttagtttctttatttcgaaagaaagatatatatttgcaacgctttttcagaaaagcacccgatattgcagaaaaaacagttgccgaaatggctcagttggtagagcaattcattcgtaatgaataggtcccgggttcgagtcccggtttcggctcaagaagcggtagaataccgcttctttttattttatatagggatattcagtaaatgtctctaaaaaataagatggcatatgaagatgatagggcatgaccatttcatatgccattcttattgtcatttttccgtgctttctcacatacttctatccgacaggacatgacgttccggaagaagtctgatgacctcttctgattctgtgagtaaaatcatatcatgctgctttagctgttttgtttctgattttttctatcatcagtatggcatttgccgtatgtattccaaagaaaatccacagtatttccgtcttcctgtttctggcctttatccttgagagcgagtaatgttgcttttgagtgccgaagcttccttcaagccgtgttgccctttcttttgagagttcgcttctaagcaccttcctcaaaggctcatctttggccgcccttcccttgcgcacaaaggatgtggatatcccatattttgtacagaactttctgttggcattattggcatatatggaatcggcagccacacatcttacccttacattcataagcttctgctgcatacggatacagtccttcaagcgtataccctcattgaatgccttgaacgagaggtgttcgatgaacgatatgccgtctatctgtatattattgacctttgcaccgaactcgacggacttggtttccttgcctctgacgatgggacgtacataatgacggtcaatgctgacgatgcggtcactgactttccgcccttcaaacatttccttttcttgtacaagcacctttctgatgatggaaagacgcttatgataatcctgggtatatcggagtaaaggaccgtactcgctatggatcccatccctttgactgaggagcttttcaagaagcttgatcatacggcgcttaagcattcttgtccttgaagctctcctctttcttttcttgcagtaggacagataggattccgccacattcctgtatttgttgcgcggacgccttatgcccagctccctgcaatgccggcatatatgcctgtagagccattcgaggctttcccaaaggagtttcatgtccgtaggaaaacgcatgtggctttcatagcatgtggcatcggtcatgcagacgtgaaggttatcaagataaggtttccagtgtgaagccaggagctcctggaaagaatcaatgtcaaggcgggatgctatctcattacggatggcactgactatcttgaagttggttatgggaagggacgggggaatcataattccacagaaaatctggtagtgtatgttcccgttcagatgttccaccagttgcctgtcggagaatccggtgtatgccttcaggaccataagggcgatctttgcggaaggactgaatctgttcctgcgtcccaggcgccggtccgacaggccggcggcttttgccatacattcaaacggaaagaccgaatgaagcttgccaagctcactctcattaaaactcttgcggtatttttccagaatatcaaattctgtaaaacccaaagtagggtgaatttctgaaatattcactatctttgccatatcttattagtttggatatttcccccgttttggccgtcaaatcttattttcgggggaatacctaaagatacaaaaaagccaactaattcgcaatactttgtgtatgaattagttggctgattttgtaatatttaatgaatgtccctatatagttctctttttccatataataaagcccttctccacggtcaccattctctaaatcagttaactctactttaaatattcggtaggggagaatatttttctggtgtctgggcatatccacggtcagcagataggcattgccgtattcggtagcatcgaagtactcttttatctcttgtttcatcagaacaggtacttcttctccatttatccaaacgatagcttttagtttgtcagccgatggtgccagcaaaacgcctttggcttgtttgcttaaacctgtttgctcaatcttgctaagatcctgtgcatgtacaagtgaggatttttcttctttttgccattgcagggtgcgggtcagactcatgggtcgaacatatatctgataggtgggcatgcctccagggatgtggaaaatcttcaatcatgggcaaatacatggtcttgtccacataataataattttcagtccgcatccgcacaaagtccgagatgccgtaagggatttgaggcgctttttttgtttccatctttcttcttctcttttttatagctatacaaagttacaccatttttttctgatacccggcatggaaagggctgttttttccactctatttcgaaaacgttggcaaaagcaccgcgcagccttcctcttttcgaaggcaaggccgcgcaagatttcggggtgcaaagcatctcttctttgtatgcatgaaattgttggaatcagactcacgttgccatattatgaatcatatgcttcttcgtgcactcccttcacggcccgtccgcttggttcgttcatgttcttgaaggcggcgtcccacgcaagggcttcggctgtagaacatgccacactgggcacgcttggcacgctgcgggctgcgctttcactgggaaagtgctcctggaagatgctgcgatagtagtattcttccttgttttgcggcgtattgataggaaaccgttcggctgcgtgcgccatttgctcgtcactgacggcttcggcggtaagggctttcagtgtatcaatccaactatagcccacgccgtcgctgaactgctctttctgtcgccatgctacactgtcgggcaacatgtctgcaaaggctttgcggactattttcttttcgatggtgcttccggggcacatctttgcctcgggattgaggcgcatggctatgtccagaaaatctttgtccaggaaaggcactcggccttccactccccatgctgcgagggatttattggcacggaggcagtcatagaggtggagtttgcctagtttacgcacggtttcttcatgaaaggcttgggctgtaggggctttgtggaaatagagatagccgccgaacacttcatcagccccttcgccactcagcaccattttgattcccatgcttttaatgacgcgtgccagcaaatacatcggggtagaggcgcgaacggtggtgacatcgtaagtctcgatgtagtaaatgacgtcgcggatagcgtccaatccttcttggatggtatagtggatttcatgatgcacggttccgataaagcgggccacttcgcgggcttttatcaggtcgggcgcaccttccagaccgatggcaaaggaatggagctgaggccaccaggcatcttttttattgtcggtttctacccgtttgcctgcatatttcttggcaatggcagagatgacggaactgtccagaccgccggaaagaagtacgccgtagggcacatcactcatcagttggcgtttaacggcctcttccagtccgtcgtgtatgtccagggaataggcattgttgtttttcacggcttcgtattcaaaccagtcgcggacgtaccagcgggtcatcttgccttcttttccccaatagtaatggccgggaaggaagggttcgtattcatcacagaacccttcgagggctttcaactcgctggcgcagtatattttgccgtccttatccttacctatatataaaggtatgactccgatggggtcgcgggcaatgaggaaatcgtctttctcctcatcataaagggcgaaggcgaagatgccgttcagctcttcgaggaagtgaatacctttgtcacggtaaagggcaaggatgacttcgcaatcgcttccggtatggaaatcatatttttcggcgtactttgcacgaacatcccgatggttgtagatttctccgttcacggcgaggatttgtttccggtcgggactatataggggttgccctccgctttgagggtctacgatggagaggcgttcatgggccaggatggcagagtcgcctacgtagatgccgctccagtccggcccgcggtggcggagcttttgtgacattttcaatgccttctgacgcagttcctgcgtttgttgctttatcttgaatattcctacgattccacacataattgtatttgttgatttatttattgagataactgtctatgtccgttgccgctttccgtccgctggcaatggcgcgtaccaccaggctggctccgcttgctgcatcgccggctacgaatacgttttcggcgaattggggatgttcgggctttaggaatcccattgccagaagaaccaggtcggcttcaatcacttccacctttccggtgggcttcatgacagggcggccgccgtcgggactcggagtccattccaccggttccacttccacaccgcacactttaccgtttttgcctaaaaacttacgggtggcgagagaccataggcggctgcacccttcttcgtgagaagaggtggttttcagtacgacggggaattggggccatggagtggcaggattctgtcctacgggcggctggggcatgatttctatttgggtgacgcttagggcaccttgccggttgctggtccctatgcagtcgctgccggtatcccctccgccgatgaccagtacttttttccctttggcagtaaccagttgttctttcgggaacgtcatgccggcaaggatacggttttgttgcgccagcatgtccagtgccgggtggatgcctttcagttcgcgtccggggacagggaggtcacgggcggtcggagctccggtgcagatgcagtaggcgtcaaaaccttcggggagttgccgcacatccacatcgttgttcattttgaagtggatgccttcttcttccatcacccggatacggcggtcgatgatgggcttgtgcagcttgaagttggggatgccgtaacgtagcaggccgccgggagcctcattcttgtcgaagacggtcactgtgtacccttttccgttgagctggttggcggcggccagtccggcgggcccggcgccgataatggctactttccgtccgttgcgttcaatgttccggggcttgatgtaaccttcgcggaaggctgcttcggcaatggccgcttcgttctcgcggatggtgacgggagagtccatgctcagtttcagcacgcaactcttttcgcagagggcggggcagatgcggccggtgaactcaggaaaatcgttggtttcgttcaatatcttgtaggcttcctcccatttgcctttgtagagggcatcttgaaattcgggctgcttgttgcccagcggacaagcccagtggcagaagggaacgccgcagtccatgcagcgtgaggcttgaagtttccggtcacggctgttcagagtctgttctacctcgctataatctgatatccggtcgtggatgggacggtagcccgcttcctgacgcggtatagttaaaaatgcttttggatttcccatatctttgttgtatttcttttgtcgttaataatctctttgtacatcagctattttttgttgcagcttacgcatttgttcttcttgcaatactcgtttatattcgataggtactacctgaataaattcatccacatagcgattccagtcatccaacatcgttcttgccagtttggagccggtatagaggtaatgctgacggatcagttcatgcagttccttccggtaagatgcctcctcgataagcgagagctccaccatctccatgttgcagaaataatcgaagttgtggttcttgtcccacacgtaagccacgccgccactcatcccggcagcgaaattccgtccggtttcccccagtaccacgacccgtcctccggtcatgtattcgcaacagtggtcgcctacaccctctaccacggccgtcacaccggaattgcggacagcgaagcgttcgcccacccgtccgttgatatacacctcgccgtcagtagcgccatacaacagggtgtttccggcgatggtattcttttccgcatcgaaattgctgcgcacggggggcagtacagcaatgcgtccgccgctcagtccttttcccaggtagtcattcgcttcgccttccagcttgaaactgatgccgtgggtcaggaacgcaccgaaactttggcctgccgaacctttgaatttgatgtggatggtctgttccggaagtcctgcctgcccgtatttcttggcaaccgctcctgccagcatggcgcctaccgaacggtccgtattggcgatggtgtattccagggaaatttcttttccgttttctatggcatccctggcggcggccagtatggtcacatccttcacatgggcaatgtcgtgcttctgttccatgacatggtgtatggcagctccgttgtccacccggtgtagcagtctgctgaaatccaatagtgaggatttcttctcacttggtgcttgttgtatttcaatcaggtctgtccgtccgatgatatcctccaaccgggtgaatcccatttcggccagatattcgcgtacttcctgtgccaggaaagtgaaataattcactacatattcatagtgtccgcggaaatgtttgcggagttcggggtcttgggtggccacgcctacgggacaggtgttggtgtggcacttgcgcatcatgacgcatcccagtacaatcaatgcggtggtaccgaaaccgaattcttccgcacccagcaaggccatgttgataatatcccgtccggttttcaactgtccgtccacttgcagtttcacttgtccgcggagtccgttcaacaccaaggtctgttgcgtctcgctcagtcctatttcgggcgagatacctgcataccgcatactcgatgcaggcgacgcgccggttcctccttccgctcccgaaatgacaatcaggtcggctttcgctttggctactccggcggcaatggttcctacgccgctttcggctaccagtttcacgctgattcgtgcctgtggatttacgtttttcaggtcgaaaatcaactgggccaaatcttcgatggaataaatgtcatgatggggtggaggggaaatgagcgagatgcccggaatggagtggcgggttttggcaatcacctcgtctaccttgaatcccggcagttgtcctccttctcccggcttggcgccttgggccacctttatctggatctcttcggcatggaccaggtattcggcggtgactccgaagcgtcccgatgctatctgcttggtcttgctgcaaagtgagataccctggtaagtgccggtaatgcggtcgctgtcctcacctccttcacccgtattgctgcgtgcgcccagtttgttcatggccagtgccagcgcctcatgtgcctccttgctgatagcgccgaaggacatggctcctgtcacgaaatgtttcacgatgttttctaccggctccaccttttcaatatcaatggggtttcgtttgtgtccgaagaagtcgcgcaggaagaggggggaatcttttccatctaccatggaggtgaattccttgaacttcttgtagctgcccagccgggtggccagttgcagggtggagatggtttccggattccaggcgtgccgttctccgtctttgcggaaagagaaaagtccgttgtgcggtaaaatgtcgctcacttcttttgcagcgaatccggcatcgtgcagggcgatggcgtctctggcgacttcttccagacggatgcctccgatgctggatgtctgtgtgccgaaatagcttctcagcaattcctcgctgacccctacggcttcaaaaatctttgcgccccgataggaacggatggtagaaatgcccatcttgctcatgatcttgaacaagcccttgcggatggccttgatataattcttctcggccgtttcgtaattcatctgcacatcgcctttcctcaccagttcatccagtacggcgaaggccatgtagggattgatggcactggcgccatatcccagcaacagggcggcgtgcatcacctcgcgaatctcgccgctttctacaatcaatgcggtttgcacgcgtttctgaacggagatgaggtgatgatggacagcgctaactgccagtagcgacgggatggcggcatgggtgtcgtccacaaaacggtcgctcagaatgatatagttcactccgtcggtaacggattgctcggcttgtttgcacaggtcgttcagggcctcttgcaatccggtttttcccttgctcacctcgaatacgatagggagtttcacggtattgaatcctttataccggatgttgcagaggatgtccagttgggtgttgttcagcacgggatgaggcaggcgtaccattttgcaatggctttcgctgggcaccaggatattcattcccacggcgccgatgtactcggtgagcgacatgactaactcttcacggatagggtcgatggcgggattggtcacttgggcaaactgttgccggaaatagttgaacagtaactgcggcctgtccgaaaggacggccagcggcgtgtcgttacccatagaggcgatgggttcggcccctgtgttgcacatcggcatgagggtgcgttctatatcctcgcgcgagaagccgaaggtacgcagcatacggtcatagccgtctatccggttgtctatcttgcgtccgcttttcaaggtatcgagctcgatgcggttggcagacagccaggcgcgataggggcgtgccgatgccagttgttctttcagctcaccgtcataatatattttaccctgttcggtatcaatcatcagtatttttcccggttgcagacgccctttctctttaatctctcccggttcgaaatccatcacgcctacttcactggccactaccatcatgtcattattggtaatgaggtaacgggcagggcgcaggccgttgcggtccagcatccctccggcatagcgtccgtcactgaacagcagtgcggcaggcccgtcccaaggttccatcaggatggagtgatattcgtaaaacgctttcaaatcttcactgatggggtttttgtcgttgaacgattcgggtaccagcatcgccatggcatggggcaggctcagtcccgacatcacaaaaaattccagcacattgtccagtgaggcactgtcgctcatgcccggctggataatgggacggatgtctttgacatcccccaatgccggagaggaaaggacactttcgcgcgcctccatccaaccccggttaccgcggatggtattgatttcgccgttgtgcgctaacaaacggaacggttgggcgaggctccatgtaggaaatgtgttggtgctgaaacgggagtgtaccaatgccaatccgctggtaaagtagggttgcgtcaggtccgggaagtactcgcgcacttgcatggacgagagcatacctttatatataatgttttttgccgatagcgaaacgatgtagaagtccgtgtgccgcacgcgcttttctatcttcttgcggatgatgtagagggtgcgttccaggctgtccgcatctgtcactccggtgatgaatacctgtttgatgtccggttcggtggcccgtgcgtcctttcccaggcaggcggggttggtgggcacattgcgcaggtgcatcaaggtaagtccttcgcgttctatttcttcaatcataatgcttaggatgccggcctgctctttttcgtctttgggcagaaatacgagtccggttccgtattttcctttttcgggtacggggatgccttgcaggaggatgaattcgtggggaatctgtagcatgattccggctccgtcgccggttttgttatcggctccttctgcgcctcggtggcgcatgttttccaatacctttaatgcggagtctaccagttcatgcgacttgttgccatgaatgttgactaccatgcctacgccgcaagcgtcatgttcgttggttgcgtcataaagacctgtttgctctgtttttaccattattgctatctttagtttataataatgttggtttgtatttcatattgttctgcaaaagtaggtaatttatttctttttgatgaagagttgatgctttcttttgatacaaagatgcagtcttgcgtctttgtattacagtttgttgtatatatgacgtgtctatttaatatttgaaagctagattatgaaaaatacttttaaattgtaagtttgggcatttcttttattcatatagattgtatttatgacggcatatcccctttatagtcaatcgatcggatataataatgggaatattacattccccaatcatataacgacctattgacttacaattcaaaactatctacccttgttttgatgcaatttgaaagaaaaaataaacgcttctgtttctatttgttattagaatgaaaataaataagaaaatagaaacaattatatcttataaaatatcaaaaagatatatatttgcacagaattaaaagcaaaaggaaactacaatagataagtattaatcaaaatggcaacaactatcaagtttaccaagatgcaaggaaccggtaatgattatatctatgtaaataccttgtcttctccgctgcaagatccgataaaagccgccagaaaatggagcgcttatcataccggtatcggtgcagacggtctggtactgattggagcatccgaaaaagcggatttcagtatgcgtatattcaatgcagacggctccgaagccatgatgtgtggaaatgcctcgcgctgcataggcaaatatgtatacgagaaaggactgacggataaggaggtgatcacgctggaaaccctttcgggaatcaaaatcctgaaacttcatacaggcaacggggtggtgaaggatgtaaccgtagatatgggtacgcccctgctatcaaaccccggacagatagctatgaaaaccggtggaatgctggcagaaactatcctggccgatggaaaagaatacaaaggaacattcgtctgcatgggaaatccgcatgttgtcattttcgtagatgatataaaagaggtggatttgcccgcggttggcccgaaactggaaaatcatccgctttttcctgagcggaccaatgtggaatttgtagaaatattgccggaccaatccctacggatgagagtgtgggaaagaggttcgggcatcacaatggcttgcggaacaggggcctgcgccaccgccgtggcggccgtactgaaccataaagccggacgaaaatcgtgggtaaggatggacggaggcgatctccacatccactgggacgagaaagacggacatgtatacatgaccggtccggccggaaaggttttcgaaggcgaaatagagatgtgatactgattttgaaaaacttaaaacaacgataaaaacaataacagcgatggcactagtaaacgaacattttttaaaactaccaaacaattacttgttttcggacattgccaaaaaggtaaatgcattcaaagtctctcatcccaaaacggacctcatccgcctgggcatcggagatgtaacccgcccgctgcctcaagcttccatcgaagccatgcataaggcagtagacgagctggcaaacaaagagacattccacggttacggtcccgaacaaggctatgatttcctgatagatgccgtcatcaggaacgattacgctccgcgcggcgtccatctggaacccggtgaagtctttatcagcgacggcgccaagagcgatacgggaaatatcggagacatccttcgccacgacaacagcatcggcgtgacagaccccatctaccccgtatacatcgactcgaacgtaatgtgcggccgcgccgggatactggaagacgggcgatggagcaacgtggtatacttgccttgcctgagcgagaataatttcgtgcccgaaatccccgaccgcaggatagatatcctatacctctgctatcccaataaccctacggggacggtcattagcaaggccgaactgaaaaagtgggtgaactatgcattggaaaatgataccctcatcctttacgatgctgcctacgaggcctacatacaagacccggacattcctcactccatttatgagataaaaggagcgaagaaagtagcgatagaatttcgcagtttctcgaagacagccggattcaccggggtgcgttgcgggtacaccgtcgtaccgaaagaactcacagccgccacgctggaaggagagcgcattccgctgaaccggatgtggaaccgtcgccagtgcaccaagttcaacggcacatcctatatcacccagcgtggtgccgaagcgatctatacccccgaaggcaaaaagcaagtgaaagccatcatacagtattatatggctaacgcccgcatcatgaaagaagcgttggaaagtacaggactcaacgttttcggcggagagaacgccccctacctgtgggtgaaggcgccgggcgaggtaagctcgtggaaattctttgaacagatgctgtatgaagccaatgtagtgggcaccccgggagtaggcttcggtcccagtggtgaagggtatatccgcttgaccgctttcggagagcgggcggattgcgaagaagccatgaaacggatcaggaaatggttgctctgagctgtacacggcaacaccttgaagcactgtgtgcttgcaccggacttacatcaatcaagccaataggtatataaaatatgacatactcactattattaattaaaaggtaaaaagctatgaagatgaattttaaggaaacggcattgctattaggcatgtccatggtagtgccggcaacgagcatcgctcaagacaaggtggaagccagtgtaggagctgacttggtaagcggctatatttggcgcgggcaggatttgggaggcgtaagcatacagccgtcattgtccgtagcctacaaagggttttcgctcggtgcatggggatccgcaggcattgagtccgctgatacgaaagaactggacctgacgctgggctactgcaccggcggtttcagcatttcggtgacagactactggttcaatggcggtcccggttatttccactatggcacgcaccataccagccatgtattcgaagcgcagataggctacgatttcggtccgctggcagtgaactggtacaccaactttgcaggtgccgacggggtgaacaaggacggcgaccgggcatattcctcttacatatcactcgccgcccccttcaaactggcaggcctggactggacagcagaaataggagccacgccatgggccaatgacttctataacgtgtccgcagatccggaatgcagtggttcggacgggttcgccgtatgcgacatcagccttggggcatccaaggaaatcaagattacagactcattctcagtccccgccttcgccaaggtgacggtgaatccgcgcaccgaaggggcctatttcgtattcggactgagtttctgacaggaagtgcagaaaatgcagatacaataacaaattcagacataacgacacaatagagagaggtatcagtttttaaaaaggtaaaaagattggaacatataaattacaagtacaacaatgaagaaaattgaggctattatccgtaagaccaagttcgaggacgtaaaggacgcgttgctcgaagccgacatcgaatggttttcctactacgatgtaagaggcattggcaaagcacgccagggacgtatctaccgtggcgtggtgtatgataccagttcgattgaaagaatcctggtttccatcgtggtgcgcgaaaagaatgtggagaaaacagtgcaagccatcatcaaggcggcgcacaccggcgagataggcgacggacgtatttttgtcatccccattgaagacgccgtccgcatacgcacgggcgagcggggcgacatagccctgtataatgcagaacaggaaaaataagcgcaagctacttccctttaccggcaaaagtaaagtcgggaataaaacaatactacaacgtaaacgagaaaaattatggatactatactcttatttatgctccccgccggcctttgggcgcaagatgcaggcgtggcagccaccaccgcggcgcccgatgcaaccgccggggccctgggcgaacttgctaccggactcaacactgtatggatgctacttgctgccatgctggtattcttcatgcaaccgggattcgccttggtagaagccggattcatccgtaccaagaacacggccaacgtgctgatgaaaaatctggtagacttcatgttcggctccgtcctgttctggttcatcggcttcgggctgatgttcggcataggcggttttgtgggcgccccccattttttaaacttggaggcgatggacaaaatcatcgataacggattgcccatcgaaggcttcctgattttccagactgtattctgcgccacggcggccaccatcgtgtccggtgccatggcagaacgtaccaagttctccatgtatctggtctatactatctttatcagcgtgctcatttatccggtttccggccactggacctggggcggcggatggctgatgaacggagatgaaggctcctttatgatgaggacgttcggcactactttccatgactttgccggctctacggtggttcactccgtaggtggatggattgccctggtgggcgccgccattctggggccgcgtattggcaaatacgggaaagacggcaaatcaagagccatccccggtcatagtttgacgcttgcctgcctgggcgtgtttatcctttggttcggctggttcgggttcaaccccggttcgcagttggcagcggcaacaagtggagaccagacggccatttcgcatgtgttcctcaccaccaacctggcagcttgtgcaggaggattcttcgcactggtggctagttggatgaagtatggcaaaccttccttgtccctcacgctgaacggtgtgctggcaggactggtgggcatcacggcgggatgtgacctggtatcgcctttcgggtctgtacttatcggtgctatttgcggcgtggtaatgatatttgcagtcgactttatcgaccatgtgctgaagattgacgaccccgtaggcgcatcgtccgtacacggcgtttgcggttgcctgggaacaatccttacaggacttttcgctacagaagaggggctgttctatggcggcggcagcagcttcctgctggcacagctcttcggtgcggccgtggtaggagcgtgggcggcaggcatgggcttcattgtttttaaagtgctggacaagatacatggcttgcgtgttccgaaacgcattgaagaggaaggactcgatatctacgagcatggagagtcggcatacaattaatcacaaaagtttttttcattcactctactaatcaacaactaaacaaatttaggtattatgtcaaaattaagattcagagtagtcgaaacggctttcaagaagaaagcagcaacggtggagacaccagccgaaaggcccagtgaatatttcgccaaatacgttttcaaccgcgagaaaatgttcaagtatctgcccggcgccgtctatgccaaactgacggacgccatggacaacggcgcccccctggagcgtgccatagccgacgaagtggcggcaggtatgaaacgctgggcaactgagctaggggtaacccactacacccactggttccaacccctgacggaaggcacagccgaaaagcacgacgcctttgtggaacacgacggcaagggtggaatgatggaggaattttcgggcaaactcctcgtacagcaggagcccgatgcttccagcttccccaacggcggcatccgaaacactttcgaggcacgcggctacagcgcatgggatccctcatcgcctgtcttcgtggtggacgacaccctgtgcatccctaccgtcttcattgcttacaccggcgagtcgctggactataaaacgccactgctgaaagccttgagtgctgtgggcaaagccgccgtggacgtgtgccgttacttcaacccggaagtgaagaaagtggtggcctacctgggctgggaacaggaatacttcttggtagacgaaggactgtatgccgcccgtcccgacctgctgctgaccgggcgcaccctgatgggacacgaagccagcaagaaccagcaattggaagaccattacttcggagccatccccacccgtgtggctgcctttatgaaagaccttgaaatacaggcgctggaactgggcatacccgtcaagacccgccataacgaagtggctcccaaccaatttgagctggctcccattttcgaagaatgcaacctggcggtagaccataacatgcttctcatgtcactcatgcgcaaggtggcgcggagccacggcttccgcctgttgctgcacgaaaaacccttcaaaggcgtcaacggctcggggaagcataacaactggtcactgggtacagacaccggcgtcctgctgatggctccgggcaagaccgccgaagacaatctgcgcttcatcaccttcatagtcaacaccctgatggcggtataccaccacaacggtttgctgaaagcctctatcatgagtgccaccaacgcccatcgcctgggagccaacgaagcgccgcccgccatcatttcttctttcctgggcaaacagctcacgcaagtgctggaccatatagaagaaagcggcaacgacgaccttgtctcactggctggcaaacagggaatgaagctggatatcccgcaaattcccgaactgctgattgacaataccgaccgtaaccgcacctcaccgttcgccttcaccggcaaccgtttcgagttccgcgccgtaggctcggaggcaaactgcgccagcgccatgattgcgctcaacgcggccgttgccgaacagcttgcccggttcaagcaggatgtggacgcgctcatcgaaaagggtgaaccgaaaatctccgccatcatcgaaattatccgctgctacatcaaggagtgcaagcctgtccgttttgacggcaacggctactcggacgaatggaaggcggaggccgcccgccggggtctggactgcgaaacgagctgcccgctcattttcgacaactacttgaagcccgcgagcatcgccatgttcgaatccactggcgtgatgacccgcaaggagttggaggcgcgcaatgaagtgaaatgggaaacttacacaaagaaaatccagatcgaggcgcgcgtgctgggcgacctggcgatgaaccacatcatccccgtagccaccgaataccaaagcaagctgatagacaatgtgtataaaatgaaagagctcttcccggcggaaaaagcatcccaactgtcggccgagaacatgaaactcatcgaagagattgcccggcgaaccattttcatcaccgagcatgtaaatgccatggtggaggcgcgaaaagtggcgaacaaaatagagagcgagcgcgaaaaggccattgcctatcacgataccatcgccccgatgctggaagagatacgttatcatattgacaagctggagctgatcgtagacaaccagatgtggacattacctaaatatcgtgaattgctttttattagataatcactgcataaaggttatctatttcttttgttggttgttttaagtttgcggagaggggcgtcgggatgacggtcctctttacacattacccttcttgcttgcttactgtctttcaaatcgtaactaaaaccacaacagacaatatcatactgtaagttttcatatttattaaaaaaacgaataaaatatttcttttcgatttttattcttacttttttatcgctttcgtcaattatttatggttttttattgcatttatgttaattgatatttgtatctttgcagtcgaatcagaacatatacttagtagattatgtgtggaatagtaggctatattggaaaacgagatgcttaccctgttctcataaaaggcctgaagcggttggaataccggggctatgatagcgcaggagtcgcattgatagacaaaaaaaggaggttgaacgtttataaaacgaaaggaaaggtttcagacctagaggcttttgtttcccaaaaagacgtttccggtacaattggtattgcccacacccgatgggccacccacggagagccttgtcaggctaacgctcatcctcatttttcttcttcaaagaatctagctcttatccacaatggtattattgaaaactacgctaccctgaaagaaaagctacaaaaaaaagggttcatctttaaaagtagtacagataccgaagttctcgtacagttaattgaatttttccaactttctaaccatttagatttacttactgccgttcagttggctctgcatgaggtgattggcgcatacgctatagcggtgctcgacaagaataatcccgatgagattattgcagcacgcaaaagcagtccgctggtggtagggatagggaaggatgaattctttctggcttcggatgctactccgattgtagagtatacggataaagtggtgtatctgcaagatggggagatagcggtgattcgcagagacaagacattggaagtcgtcaatctggacaacgtgcttcaaaatcccgaagtacgtacggtggaaatgaatctgggacaactggagaaagggggatacccgcatttcatgttgaaggagatattcgaacaacccgattgtattaacgactgtatgcgtggacgcatcaatgcggacggtgataaagtagtactgtcggcggttattgatcataaggaacgtctgctcaaggctcgtcgctttgtaattgtggcttgcggaacttcgtggcatgccggattgatagggaaacaactgatagaaagtttctgccgtattccggtagaagtggaatatgcctccgagttccgctatcgtgatccggtgattcatgaagacgatgtggtaatagctatctcgcaatcgggtgaaacggccgatacattggctgccatagaactggcgaaagagaaaggagcttttatctatggtatatgcaatgcggtaggttcatccattccgcgcattacagataccggttcttatattcatgtaggaccggaaataggagtggcgtccaccaaggcatttaccggacaggtaaccgtgcttaccatgctggcgctgacgctggcaaaagagaaagggagtatggcagatgagaaatacctggaagtgatccgggaattgactgtgattccggctaaaataaaaaagatattgatcagtaatcctaaaatagcggaactgtcgcgtattttcacctatgcacataatttcctctatttggggcgggggtacagtttcccggtagctttggaaggcgcgttaaagttgaaggagatatcttatattcacgctgaaggctatcccgccgctgagatgaaacatgggcctatcgcattgattgatgccgaaatgcctgttgtggtggtagctacgcataatgcgatgtatgaaaagataatgagtaacatacaggaaatcaaggcgcggaagggaaaagtaatcgctttggtcacagaaggagatacggtaatcagtaagttggccgatgattgcattgagttgcccgaaacattagagtgcctcgaaccgttgatagctacgatccccttgcagttattggcctaccatgtagccatttgcaaagggaagaatgtggatcagccacgaaatctggcgaagtcggtaacagtagaatagaaggcaatgctgccggagattatgcaggaagtttccggcataattcttgaaagatgtaccgtaagtttggaaaaatgacagaaggtcttgtcatacctttgggatgtttttataagaatctgaaaatgaactattaatttaagtagtaaagagagagcatggaaccgttaaagcatgaatgtggagtcgctatgatacgactgctgaaaccgctggaatattatcaggaaaagtatggaacctggatgtatggcttgaacaagctgtatctgctgatggaaaaacaacacaaccgcggacaggaaggcgccgggttggcctgtgtcaaactggaggccaatcccggtgaagaatatatgttccgtgaaagagctttaggttcaggggcgataacagagatattcggtacggtgcaaaatcatttcaaggatttggcgcctgaacaattgcatgatgccggatacgccaagaaatgccttccctttgccggagaggtatatatggggcatttgcgttattccactaccggaaaaagcggtatctcctacgtgcatccgttcttgcgccgtaacaactggcgtgccaagaatttggcgttgtgcggcaatttcaacatgaccaatgtggatgagattttcgcacgtatcactgccgacggccagcatccgcgtaaatatgccgacacatatattatgctggaacaagtggggcaccgtttggatcgcgaggtggagcgcctctatgtggaatgtgagaaggaaggtctgaaaggcatggatatcacttacgctatagaagaccgcattgatctgggcaatgtcctcaagacttcgagcaaggagtgggatggaggctatgtgatctgcggtatgaccggtagcggtgagtcttttgcggtgcgcgatccgtggggcattcgtccggctttctggtacatggacgatgaaatcatggtattggcatccgagcgccctgtcattcagactgccttgaatgtatctgccggaagcatcaatgaattgcaaccgggacaggctatccttataagcaagactggaaagatgcgtctggcacagatcaaccgggcgaaagagaagaaagcctgttccttcgaacgtatctatttcagccggggaagtgacatggatatttataaagaaagaaaacagctgggcgaaaaactggtgaatcctattttgaaagcggtagactatgatgtggagcataccgtattctcttttatacccaatacggcggaagtggctttctatggactgctggaaggattcgacaattatctgaatgaactgaaagtaaagaagatagaggctttggggcatcatcccaatcacgaggaactggaaaaaatcctgtcctggcgtatccgtagcgagaaagtagccatcaaggatatcaagctgcgtacctttatcgccgaaggcaacagtcggaatgatttggctgcccatgtgtatgatatcacttatggaagccttgtgcctcatgtggataatctggtgattattgatgacagcatcgtccggggaactacgttaagacagagcattatcggcatcctcgaccgcctgcatccgaagaaaatcgtcattgtttcttcttcgccacaggtgcgttatcctgattattatggtattgatatggccagtatggatcagtttatcgctttcaaggctgctatcgatttattgaaagaacgggatatgaaagatgtgatagcccgtgcttacaacaaatcgaaagaccaggtggggttacccaaagagcagatggtgaattatgtgaaagaaatttatgcccctttcactaatgaggagattgcggcaaaaatggtggaacttctcactccgaagggtacgcaggcgaaagtggaaatcgtttatcagacactggaaggattgcatgaagcgtgtcccaaccatacgggcgactggtatttcagtggggattatcctactccgggtggagtgaagctggtgaaccaggcgtttatagactatatagaaaaagtttatcaattctaaagaacaaccattcaagatagattagatgagaaatgtaacattgatcctcgacgacgggagccgtttcccgggcaagtcgttcggttatgagaaaccggtagccggcgaagtggtgtttaatactgctatgaccggttatcctgagagtttgacagacccttcatatgcggggcagctgatgaccttaacttatccgttggtcggtaactacggggtacctccctttactatcgaacccaatggcttggctacttttatggaaagtgaacgtatccatgccgaagcgattattgtaagtgattacagtgaagaatacagtcactggaatgcgaaagaaagtctggccgactggctgaagcgtgagcaagtgccgggcattacaggcatcgatacccgtgaactgaccaaagttcttcgcgaacatggggtaatgatggggaaaattgtatttgatgatgaacccggcaatgtgcccgaagcaatgtatgcaggtatcaattatgtagataaagtatcgtgtaaggaagtcattcgttacaatgaaggtgcaggtaagaaaaaagtggtgttggtggattgtggtgtaaagacaaatatcatccgttgcttactgaaacgggatgtggaagtgatccgtgttccttggaaccatgactttacagggatggagtatgacggattgtttatttcgaacggtccgggtgatccggatacttgcgatgaggcggtacagcatatccgcaaggcgatgagcctgagcgacaagcctattttcggcatttgtatggggaatcagttgctttccaaagcaggaggcgccaccatctataaattgaaatacggtcatcgcagccataaccaaccggtgcgcatgataggaacggaacgttgtttcattaccagtcagaaccacggttatgcggtagataataatacattgggaaccgattgggaaccgctgttcatcaatatgaatgacggttccaacgagggtatcaggcataaaaccaaaccttggttctcggcacagttccatccggaagctgcatcgggacctacggataccgagttcctgtttgatgagtttgtgaagttgttataaaccgtgtattaaaaagaacaagtatgaaagacgaaataaagaaagtattgttattaggttccggtgccttgaagattggcgaggccggagaatttgactattcgggttcgcaagcattgaaagccttgaaggaggaagggattgaaacggttctgatcaacccgaacatcgctaccgtgcagaccagcgaaggggtggcagaccagatttatttcctgcccgttactccttattttgtagagaaggtgatagaaaaggaacgtccggacggcgtgctcctgtctttcggcggacagactgccttgaactgtggggtggcactgtacaaagcaggtatcttcgaaaaatacaatgtccgtgtgttgggtactcctgtgcaggccatcatggatactgaagaccgtgaattgtttgtagaaaaactgaatgaaatcaatgtcaagaccatcaagagcgaagcggtggaaaatctggaagatgcccgtcgcgccgctaaagaattaggttatccggtcattatccgtgccgcctatgcattgggtggtttgggctcaggtttctgtgacaatgaagaggaactgaatgttctggctgaaaaggccttctctttctctccgcaggtattggtggaaaagagtttgaaaggctggaaggaggtggagtatgaagtggtccgtgaccgttatgataactgcatcactgtatgtaacatggagaacttcgacccgctgggtatccataccggcgagtctatcgtgatcgccccttcgcagacactgaccaatgccgagtatcataaacttcgtgaactggctatccgtatcatccgccatatcggcattgtgggcgaatgcaatgtacagtatgccttcgatcccgaatcggaagattaccgtgtcattgaggtcaacgcccgtctttcgcgttcgtctgcattggcttccaaggctaccggctatccgttggctttcgttgccgccaaattaggcttgggatatgggttgttcgacttgaaaaactcggtgacaaagaccaccagtgccttcttcgagcctgcactggactatgtggtgtgcaagattccccgttgggacttgggcaagttccacggtgtggaccgtgaactgggctcgtccatgaaatcggtgggcgaggtgatggctatcggacgtactttcgaagaagccattcagaaaggtttgcgcatgattggtcagggaatgcatggtttcgtagagaataaggaattggttatagaagacgtggacaaagcccttcgtgagccgacggacaaacgtatcttcgtgatcagcaaagccatgcgtgcaggttacacggtagaccagattcatgagctgaccaagattgacaaatggttcttgcagaaattgcagcacatcatggacacttctaaagagatgcacgaatggggcaataaccacaagcagattaccgatatgccggacgaattgctccgcaaggcgaaagtgcagggattctccgatttccagatagcccgtgccattggctacgaaggagatatggaagacggtattctgtatgtgcgtaatcatcgtaagcaggtgggaatccttccggtggtgaaacaaatcgatactttggcggccgagtaccctgcacagaccaactatctgtacttgacgtatagtggtgtgatcaatgatgtgaagtacttaggcgaccataaatccatcgtggtactgggttcgggtgcttaccgcatcggttcgtcggtggaatttgactggtgtggcgtgcaggctttgcagactatccgtaaggagggttaccgcagtgtcatgattaattataatcccgaaacggtttctaccgactatgatatgtgtgaccgtctgtactttgacgagctgactttcgagcgtgtgatggatattctcgagctggagaatcctcacggagtcattgtatctaccggtggccagattcctaacaatctggctctccgtctggatgcgcaaaatgtaaatatcctcggtaccagtgccaagagcattgacaatgccgaagaccgggataaattctcggccatgctggaccgcatcggagtggaccagcccgaatggagcgcattgacttctatggaagacatccatgcctttattgacaaggtaggcttccctgttttggtacgtccctcgtatgtgctgagtggtgcggccatgaatgtctgctccaatcaagaagagttggaacgcttcctgaaactggctgccaatgtatcgaaaaagcatccggtagtggtgagccagttcatcgagcacgccaaggaagtggaaatggacgctgtggctcagaatggtgagattgtggcatatgctatcagtgagcacattgagtatgccggagtgcattcgggcgatgccactatccagttcccgccgcaaaagctgtatgtggaaacggtgcgccgcatcaagcgcatctcccgtcagatagccaaggaattgaatatctccggtccgttcaatatccaatatctggcaaaggacaatgatatcaaggtaattgaatgtaaccttcgtgcttcacgcagcttcccctttgtcagcaaggtgctgaaaattaattttattgaactggctaccaaagtgatgctcggactgccggttgagaaaccgaacaagaatcttttcgagttggattatgtgggtattaaggccagccagttctctttcaaccgtttgcagaaagccgatccggtattgggggtagatatggcctctaccggtgaagtaggctgcatcggtacggatacttcgtgtgccgtattgaaggcgatgctgtctgtggggtatcgtattccggaaaagagcgtgttgctttctacaggtaatgccaagcagaaagcggataccttggaagcggcccgtatgttgcagaagaaaggttataaactttatgccaccggaggctcatcccacttcctgaccgagaacggggtggaaaatacccgcgtgtattggcccagtgaggaagggaaacctcaggcactggatatgttgcatcggaaagagatagacatggtagtcaatatcccgaagaatctgacagccggggagttggacaatggatataagatacgtcgtgccgctatcgacctgaatgtgcccttgataaccaatgctcgtctggcaagtgcgtttatcaatgctttctgtaccatgacgataaacgatatcgctatcaagagctgggcggaatataaatgattttaatggctgatgatatgtggttaatggggtgtggcaacagtgcactccattaactattaatcagtgacttctcttttatcggaaaataaatcactattctttctgtgtttacaaaaagttttctacttttgtccaattaggaatcctaaagatattcaaaacaaatggattgtgaacacaagcttaaagtattagagcaggaaattgaatcgttgaaagaggagaacaggctgctgaaagaaaaattatcttcttctgaaaaaaactttgatggcgttagtttcaaggagaaatatgcggtaagaatattagattccttgccggatatgttgaccgttttcaatcatgaggaaatggggatagaggtggtgtctaatgaggaaacaaatcatgtgggtgtatccaacaacgattttaaggggatgcgtatgcaggatatggttcctaaagaggcttatcacaatatacataataatcttcagaaggttatttcgacaggtaggggttctacagcccatcatgaattggatgtggacgggacgcttcattattatgaaaatcgtattttccccttagatgaagaatatgtgttgataatgtgccgtgatattagtgaaagagttgccacacagcagaatttggaaatatttaaacggatattggatagggtcagtgatagtattctggctgtatcggctgacggaaccttagtctatgccaaccggcagtttattgaggaatatggagtgaaaggggaattaggaacacagaaaatctatgatttgcctgtttccttgaatactaaagaacagtttgataaacgtgttcaggagattcgcgataacggaggtaattttgcttatcgtgccaaatatacccgtgtgggagaaacaaaacttcgtgttcatcaggtttcggcctttatgattcaaaatcagggcgaggaaatgatttggttctttacacaggatataacagatgttatcaagaatcgtgatgaattgcgtgaattgaattatctgatggatgctatactgaataatattcctgtttatttgtttgtgaaggaccctgaagatgatttccgatatctttattggaataaggcgtttgccactcactctaaaattcctgcttccaaagcgttggggcgtactgattttgaagtatttcccgaatatgagaatgcggagaagtttcatcgggatgatttggaattgattcgtacccgcgaacgtatggaaatgcaggaaacgtatgtgacggctacaggagagccccgtattgtgcagaccttgaaaacgttggttcctctggaagggaggacaccgctcattatcggtatttcatgggatattaccaatatacagaatatagagcaggaattgatattcgcccgtatcaaagccgaacagtccgacaggttgaaaaccgctttcctagccaatatgagccatgaaatccgtactccgctgaatgcaattgtgggattttcgcatttgatgactatagcggataacgcagaggatgaaaaactttattcggacatcatcaaccagaattcggaaatattgttgcaattaatcaatgacatacttgatttggcaaaaatagaggcgggtacattggaatacatcagatatccaatggatttgggagaattgtgccgtaatgtgtatgagatgcataaggatcgggtgcagactggggttgttttgatattagacaataaagacaccagcttgataatcaatgaagatcagaaccgaattatgcaagttgttacaaatttgataaccaatgctataaaatttactttcaaaggggaaatccgttttggttttgaagtgagggaggagtatattgatttttatgtaaaagatacgggaatgggtatctccgaggagaagattaaaatgatttttgagcgtttcgtgaaactgaatacttttgttcagggaacaggtttggggcttgcgatttgtagggtgattgtagaaaaactaggtggagagattactgcggaatccaaactgaatgaaggttctacttttcgttttacgattccttataaggcgggtaaaaaaattccggaatccggaaaggctatgaagtgtccggaatcagggagtacgggaccgagaaaagtgttgcaaagaagaacagtactggtggcggaagatgtagacagcaactttttgctgttaaagacattgttagggaaaagatgtaatctgctatgggctaagaatggagaggatgcggtgaatcaatttaaagaacatcagcccgacttgattttgatggatatcaagatgccccatatggatgggctggaggctacgcgcctgattcgttcttattcaaaagaagtgcctattgtcgctttgactgcctttgcttttgagtccgacaaagacagggctatagaagccggatgcgatgatttcctgactaagccggtttcacaaaatgccttggaaaaagtgttggataaatatgttaagtagacattggcgaggtatagtgcgtaaagacaacaggcaatatggaacagaacagggaagggaggatgcaatgcgaagattatagatcttacccccggaagattatagatcttacaggtgaaagatttatatctttgggttgtaagattacgatggactcatagggaatagaaacggacttttataaaaacaaaagaggaactgcctctgcggcaatccctcttttctgaatttgagagcatgttatttaacttcgataaccttggctgctttttctttgtcttccggcgtacgtttcggcagctcgatagttaatacaccatcgtttacttttgcatcaattttatctttatctacatcatcaggcaggatcaatgtctgttggaatttagaataagagaattcgcgacgcaagtaacggctttctttcttgccttctttatcaccttcggtactttctgttttcttttccatagagataaccaagtcgttgtcttcgttgatatgaatcttgaagtcttctttggtcattcccggagcggcgacttctactttgtagtctttgtcactttcaataacattgatggcgggagctgttgcattggcttttaccatccagtcgttatcaaagaaatcattaaaaatacttggtaaccatgtttggtttgatcttcttactggcatcataatcttaatctcctataggttttggttaaacattttgtttatttctgaattccttcacctttcggctttgtcattcactatccataatgcaaaccgcataccattagttcgatgatatgcggtttatattgcactcttttaaacctataaaggttttcttaaagattaaaacctttgcattaaaagttggtaagcctctttaaacatttgattgtcaaggctactgccaatttgtaattttagggggacagattgacagttgttctatatcagcttgaaccgcatacggaagattccgtctttatagtcgtggcttataattttaaatgtacctatttcggacgtatttttcacgtgttgacctatacagaggcattcgtcgtaatcgccgacttttacaatccgtacggtttcggaagctttttccggtaaacgtttcatgtcaaagcgccctatagcttcctcttgagagataaattccattgtaacgggcaaatttcttcgcaatacttcgtttacggtgttttctattcttataatatccgcttcttccggacaggtttgcagcgcaaaatccagcttgctttttttgcgttctatatgggcggatattgcccgtccgcatccgaaaagattgaccattgtcctgtttatgacatgctccgtagtatgcatgggagggtattcctgtttattatggtcgttgagtgatggttgttccatagttattttatttttgttctgattttgatgggatattaaaatccgttcaaagataaattattcttttgtaataaggaagcagagaggaaatgattgcttttgtattattataaaacaacgaattttaaaagatactcaatgccggaggggagtacttttgcagaaaagtatgacgttcacgaggctcttaaccgattttaatgaggcatgaacgtcatattgatttttactgttttacatcacaggggtttggaataagaatacaaatgagtcgctgtcttttaaatcttttacagcatctcctgcataaatctttccgttggtgagggtcagtttcttgattccggctttgggactgaagtcgattttcttcaaatccaaccaaaacagattaggagtcatgaccgattcaaaataatatattttattcttctgatcggatacagaacgccagcgggtggaagatatatgaggtttgtccggtgtggtaattccgaaagggacagatacattacgcatcacactgagcacactgggtacagctattttagcgtccggagtctgagggattgcatgtatataaaaagaggcacgcacaaagcggtcgctggaacggttcgtgcccggcagcatttgcaatcctcctacttctttccagtaatcattgatagccaactgataatcatatcgtggagaattggtcatcacttggaattcttttccttcgtgtatgcttaaattcccgtccagatattccaaaaccgctgtatttcctgtttcatctgtaatagccaggtgaagagtggaagctgaaccgttgggcatgtggggagcatcaatgcggaatgattcttttttcagctcctcaacagcttcatgtacggtggcaaaattgtccagtacatattgtgtccatatgctgattcccatgacaggacgtgtatctcccggacggtcaaagacggattctggcaaaaataacagactggcaaccaatcctttttcattcattccgtcacacgtacctatatcatatcctgttgcaatgacgctgccgtattttgaagtccatttcacggcattttctttattatatcctgcacgttgtattcctctggggaaaacatagatattactcataatatcttctttccagtccattgtacgtccggttactaccatatggtccggtccgatatagacagcacgcgtgcatgcatccgctttttgtacgctcatatagaacatacctgccaatgttagtaatgcaatacttcctttttttaatttcatgattctatcatttataaagattgtctttgccatttagaacaaaccggataaggaacaggtttatggaaatgcagtgatttgtgatacatttgttgataaatgctaattcatcggttcgattggaacgtaaatcacatccgcattcccttcataaatttctacctgattatcctgtcggagggattctgttgagaacgattgaagataggtcgaggtttctggattaaaagaaatacttgttttatcgtaaaagtaagggggataaaataaaaaaaggagcaacgccttgctccaacctttgttaaccttaaatctaatactatgaaaaacacattgcaaaggtacggactttttggaaaatagcaaataatcagacttaaaaagtatgctatataacattgtttaatatttgcgtttctcgaaaacctgttttttaagacttcttttgcgtatctttgcagccgttaaaaaatagcagacgatagtaaaaagagaaaatatatggcatttgaagcgacaaagagagagtggggcgagctttacgcctttttccgcttgttagcggacggatatgtgtatgcaggtacgcctgatgtgaaaaggaatgaagtgcaaaagcttcctgtggcgatggtacagcgtgaggaacatgacgggacacgccgttatattctggaggatgaggcgaccgtacgtatttgtggggaaaagatagataagcagatacctcgtgaggattttgcggctgtggcagagttggtttttgctgctgtcaaagagagccgagagaatgatgtgatgtctcccgacggtgtagaagaatttttagatgaagtcgccatttatgacttggaagcaaagacggatgaccgtactgatttctatgttgctttttacagtatagaggccccgttggtaggtttttgcgttcgttcccgtttgggaactatgtttccgttgttggatggagggcgtaccgccaatttgaagttcgagcagacaggtgttaaattcgctactcctaccgtaaacaaaattaatgcttttggtgaagaagatgatgtggcaggacgtatgttgatgatagaacgcttgggaggaatcttaaaatataatgatgtggccgataaggtattccgtagtaatctttgcatgatagatcttcattttccccgtatgttgggcgagatgttgcgtgtcatgcatttggatggcatatccaaagttagtgacctgacagaagcaatcaaacaaatcaatccgttgaaaataaaggatgaattgatccataagcatagttattatgaatataagatgaagcagtttcttatggctttggctttaggaatgcgtcctgccaagatatttaatgggatagattctgccatatccggttttctgtttgtaaatggtaatggagaggtactttgttatcagaaggctgaccgtcaggtatttgccgatttcctgtttgttaattcccggtttgagaaaagttctactgaaaaagataaatacggatatctggaacgtgagaacggagtctattattttaagctgaacttgaaaatcggtctgttgaagagataggacaatgaaggaatttgtattttcctagagttaaaatgttttttaccacagattacacagattgaaatacgatttattgcttatttcaatctgtatctgtgttaatctgagtaatctgtggtgggaaactatagcttgaatttcagaatttttccattcattccatctagtaatacgggagttgttttgtccggcataagagtcagcttctctgtgtttccggtcagcaattcggttgcctcatattctccataacgatggatgcctaaataatcaaacgcatgttgcggaatattgacggctgaacgtgccggtatggagtcaaagttaaccataattaatatcagttcatcatcctgttttcgtaaaaaggcgtattgtttatgttcgttaaatacccatccggccagattggcataggttaagtcaaagaacacaccttcccgtatggctttttcactgttgcatatattcagcagacgggtatagaattgtttcaattgcttttcatcttcattcaggaatttattgtcaaacttgcctccattgcgccagcggcgtatgctgtccacactccagtaatcaaagatggtagttcttccgtcacgcccgctgaaaccttccgtatccatgccatgttctcccaattcctgcccgaagtaaatcatgaccggattggtattcatgcaagccgatacaatcattgcggggatggcttttgagccgtttccggcaaaataatcggaagctatgcgctgctcgtcatgattttccaggaaattgagcattcgtttttcaatacctcccaagctttgccagcgttgtggaatagcagttgccgattcccatccgcaggtaatggcacgtagcgtatcatacagacctactttgtcatataaatagtcgaatttgccattgaacagataattcctgtattctcccggattatagacctcggcgataaagatcagtttcggatgttcagctttgatttgcggaatcacccatccccagaattctacaggaaccatttctgccatatcacagcggaatccgtcaatgcctttggcagaccagaacagtaggatatcacgcatcttcacccatgtgtccggaatcggttcgaagtggcggctatgaccgttcaagtagtctataccataattcagtttcacagtttcataccagtcattggagttgggccatgcgtcaaaacggtcattaccggttgcttttgccggaaactctatgtaaggttccgctgcgccacggtgcaggtcaatattgccttccagctttgtatcgggaatataatagaaattattgttggggctgaaagcttttgtcacatcatctttctcacccaaatcggttactccttcaggcttggcgtctgaaccatattggcgggctacatggttggggacaaaatcaatgatgaccttcaatccggctttgtggcttcgtgttaccagattctcgaactctttcatacggtccggaatactggttgccaaatcagggtctacatcataataatccttgatggcatacggtgatccggcctttccttttactactgcgggatgatcgggtttgatgccatagcgggtataattggtttgggtagcatgttcaatgatacctgtataccaaatatgtgtagcacccagtgttttgatctcgtttaaagcctttgtcgtgaaatcggccatttttccgcaaccgttttcctccaaagaaccattaggcttacaacgcaggctgttgttcccgaataaacgggtgaatacctgatagataataattttttcttgtgtatccattttatttttttttgtttatctccaaattgttccattctccaggagtagtctgtccaggagttccgttgccgtattgtatcctttttcgaatatctcttcggctctttccagttctctgttgctgtattcttccagtccgtatgattcgatcagcaaatctgcaatccctttttgaggcagtgtattggcttggaaaataaaatgataggctctgagtgcgatgcttaccacattcttgctatattcatctgctaccagcggatctacattgagtgctatcactttctcgcattctttgcgaatggggctgaccggcaggttcatcaagattcctccatctacataatatgtattgttgatgcgtatgggggcaaacaagataggcatacagcaggaagcagccagtctttcggctattttcccttttttaaaagaaacgatgcgtccgtgatccaaatcggtggcggtaataatagtgggaatttttagttcttctatcgttttcgactccaagttgctgtttaagaaatcgataaaactatccagtttcagcagaccttgtttgttgatagaaaaagtggtcagttctttgaatgaatggtgctcaaaaagttcaacaatatgataaggttctttgccgtcggcatagaagacagcggcaagagcacctgcacttactccggaaagtatttccggcctgatgccatgttcatgcaaagcctgcataatccccaaatgggcaaatccttttataaatcctccgctcagggcataaccaatgttatatttaaattcattcatagtctgatctcgtttagataccgacaaacttacgaatatttttgtgaaatgccataaaaaaaatacggattactcagcatattccggtaatccgtataaaatttataataactgaattttgtttatcaagcaataccgtgtgcgttgaccgatccatcaattttcttgatcagtccttgcagtacagcacccggtccgcattcggtaaagtcatcggcaccatcggcaaccatattcttcactgtctgggtccagcgtacggaagcggtgagctgagctaccaggtttgccttgatttcagcgggatctgtgtgaggcaaagcgtccacgttctgatatacagggcatttcggagtatgaatttcagtagcgttgatagcagcttccagttccactttggcggggttcatcagcggagagtggaaggcgcctcccactttcagcggcagggcacgtttagcaccggcagctttcatttgctcgcaagccttgttgattccttcgatagaacctgagatgacaatttgtcccgggcagttataattggcagccactaccacttctccttctttagaaatcgcttcacagatttcctctactttttcgtcaggcaatgcaatgatggcagccatcgtagagggttgtgcctcacaagctttctgcatagccatagcacgtgcataaaccagtttcagaccatcttcgaaagacaatgctccggctgcaaccaatgcggaaaattcgcccagcgagtgtccggcagtcatttcaggtttgaaatcatcacccatgcaaagagcggaaattaccgagtgcagaaaaacggcaggctgagttactttagtctggcgcaagtcttcgtcagtaccttcaaacatgatgtctgtgatacggtatcctaaaatgtcgtttgctttttcaaaaagttctttggctaaagccgagttttcgtacaggtctttacccatacctacaaactgtgctccctgtccggggaatacaaatgctttcatatttttcctattttggtttaaaaacgttgcaaagttaattatttctttcggaactacggaataataatgaggcaatttgctaatatgctgcattatgtaccgcatggtaattagcacattgacaaattatttcattgttttcatcggaacaggtgcgtaaaagtgattcagcggaccgtgtccttcgcctatatgcacgtctttcccggcgtggattcctttggtgacatatgcttttgcatgttctacggcctgcggcatatcatatcccagtgccagaaaagtagcaatggcggaagaaagagtacatcctgttccgtgtgtgtttttactttctatcttatctgagataaagagatgaggcttgtcttctccagctgtttgtaatacatcgcacatcttgttgccctccaaatgtcctcctttcagtaaaacggatccgcaaccgaattttaataattccgatgcggcagctttcattgtgtccacattgcttatgcagtgttccgtcaatacttccgcctcactcagattgggcgtaatcagactggccagaggcatcagttcccgggtcagtgcactgatggcgtcctcttctatcagccggtgtccgctagtcgataccatgaccggatcgaacacaacgaaacggggtcggtatgtacgaaggcaggaggctatggcctcgactatttccacatcattaatcatacctattttaacagcatccggatggatatcttccattacggcttctatctgcccacgtacatataccggtggtacgggatgtatggcacgtactcccaaagtgttctgtacggtgattgcagtaatggctgtcgcagcataaccacccaaggcggagatggtcttcagatcagcctgtatgccggctcctccgctgcaatcggatcctgctatacttaatacacaaggatatttcttcatataaatctcattttgacaaagtatttgcaaagataacgaataatcttgttttaaatgtttgcacaagtgaagggaatcaattatttttgctaaacataaaataaagtaaaaataaggggaatgaaaagaatcctagtaacgggaggcgcaggatttatagggtcacatctatgcactcgtctgatagaggaaggtaatattgttatatgtttagacaactttttcacggggagtaaagagaatataagttacctgatcgggcatccgcgctttgaactgatagaacacgatataattaatccgttttggacggatgtggacgagatatacaatctggcatgtcccgcttctcctatacattatcagcatgatgctatcaaaacggctaagacggctgtcttcggcacgtttaatatgttgggactggcgaagcgtaacaaagcaaaaatacttcaggcttctaccagtgaggtgtatggtgatccgttgtcgcatccccaaagggagggagattggggaaatgtgaatcccataggctaccggtcttgttatgatgaaggaaaacgttgtgccgagactttgtgcatggattattaccgtcaacatggcgtcttggtaaaaataatccgcatatttaatacgtatggtcctaatatgctgaccgatgacggacgtgtaatttccaattttgtggtacaggcattgctagataaagatataaccatttatggagacggaaaacagacacgtagttttcagtacatagatgatctggtggaagggatgatacgtatgatggctacggaagatcacttcacaggaccggtgaatatcggtaacccttgcgaattttccatattcgaactggctcagaagatattggaactgacctgttctcattctaacattattttcgaacctttacctcatgatgaccctcgtcagcgcaggccggatattactctggcaaaagaaaagctggattgggagcctcacattcatctggaagaggggctgatgaaagtgattgattattttaaaagtgttctggctaaataatatatacctatgacaccggatgtaaatgttgtaataagtcattctgagtacactgttttggttgtggatgatgtggtttctaatgtcttgttgttaaaagtgttgttaacaaacgagaagtttaaggtgataactgccggtaatggaaaggaggcattatcccaggcggtcaatgcccgtcccgatttgattttgttggatgtcatgatgcccgagatgaatggttttgaagttgccgaacgattgaaagccgatccggaaacacaacatattcctattatatttctgacagccttgaataccactgccgatatagtgaagggtttcaaggtaggtgcgaatgattttatatccaaaccttttaataaggaagagcttgtgatccgtgttacccatcagatatccctgattgccgccaaacggatcatcatgaagcaaacggaagaattgcgtaagattattatggggcgcgacaagttatattctgttatcgcacatgacctgcgttcacccatgggatccattaaaatggtgctcaatatgttgatactcagtcttccgtccgaacagatcggtaaggaaatgtttgatatgctgagcatggccaatcaaagtacggaggatgttttctctttgctggataatttattgaaatggactaaaagccagataggcaagctgaatgtagtttatcaggactttgatattgtggggaatattgcttcggttatcgaaattttcaatctggtagccggtatgaagaatataaaggtgaacttcccggtgcatggaaagattgaggtacatgccgatatggatatgatgaaaaccatcttgcgtaatcttctcagcaatgcaattaagttcagttataatgattccgaaattctggttaatgccgaaatagagggtgataaagtcatagtcagtgtaaaagacaccggcaaaggcatgagtgaggaagaccaaaagaaactgttgaacacggaaactcatttcagcaaatacggaacgaataatgaggaaggttccggattaggcttgttattatgtcaggattttgctgttaagaatggtgggcgtttatggtttgagtctgaagagggaaaaggttccactttcttcttttcggtagctttgaagaagtgatttatcaaagccccacctccagatataccgggttatggtcactcatatcataaggaatcaccttatactttataccttccaataaggtggaatggaacaagtagtctatccgtagtaaatggtgaaacccccgataagtggctccgtacccttctccagcggtttgaaatccgtctttcaagccgtttttcagagtttcataagtaaaagttcccggagggtcattgaagtcaccgcatacaatcaagggatattccgtggcattgatcagcgaactgatttgttcagcctgtccggcacgtctgacagtattttcccggaagttgtcagaatagtccagataaatgcctctttcctgttcctcatcttgttctccccgagcctgtgctgctttggaacgcattctgtcaaagctggtagtctgcatgtgcacgttgatgatgcgtatcgtcataccttttacatccaggtcggcccagatggctccgttgttggtattcggaaattctattgtttgtgactgtctgatggggtagcggctgtaaatggcctgactcaatccttcggggataaacgagtaagggaatattttagcatacgtattctgtaagtcttgttccgtaaagtcgccattgcctctatattcctgaaaacaaagtacatccgtttcctccttgttcatcatctcggcaaactccttggcggagaatcccgtaatttcatttccaaatgagtggacattgtaagtcactactttcaatctgttctcgttagcatatttggtagggttataaatttggtacatggaagtgatgtattcgtaatttactatcagacccgtcaatggaatccataaccaataccgtagtctgatgagccagtaaataaataatatcgtattgacaaccaccagtataggtttgcttaaggcaacgtatgcggcaaacatattctccaccggatttattttacctgagaagtaagcgaagatggaaagtcccagaatgaagattgtgaacaggatagataaaaaataggcaaatttgtatacggctaatcttcccataaattacttttgttttagatacttgtttatagtcattttcaataagtcggcagataccggtttggttaaaaactcattgcatccgctttctatggcagctgttttgtctttttcatatgcgtatgcgcttacagcgatgacaggtacgctggcagacatttcccggatggctttggtggcgtccagaccattgatgttaggcatttttatatccatcaaaatcaagtcgggtttgtattgttcatagaatatgatagcctccataccgtcatgagcatgcaccagtttgtacatttttccgagcatagcctctatcaagtcataattgctttgatagtcttccgccactaggatggtcatttcctggtgggaagttctattgttgtctttaatggaagccggtgtaagtttttcctcccatttcatatctccgtttgccgaaatgtaaggcaatgtaaaagtgaatgtggttccggtttccattttggattgtacagctatttttcctcctaacttttctacaatgattttgctgatggaaagccccagtcctgtgccttgcacttggttgttggccatgatgaaacgatcgaatatcttgtctatcttgtcatcggaaataccgcttccggtatcggctacatgaaaaacaatctctttttccttcaatttatacccgaagctgatagaacctttggcggtgaatttcgtagcattacctatcagattggagaaaacctgaaacaagcggttcctgtctgtcgagataaccagtgacggatcggactcttcgaaaacaagctccactccgggttgacaccggaaactatacgtgttttttacatcctcacataaaatataaagggatacaggcgcatagttgaactccatcatgcccgattcaatcttcgacaggtccaaaatctcgttgataagttcctgcaggcgcatgttgtttttttctacaatatcgtaatactgcaatctttcctcggcgttttccgtttcggctataatgcgtgagaatcccagaatggcattcaacggcgtacggatttcatggctcatattggcaaggaaggcagatttcagctggttggagcgttctgctttccaaacaatttcggatgtgttctgtatatatccttccaatacggtcctttgcatatatacctctttgtggtatgtttttattctcatattgacggtctttccgtcaataaggagtctatagtttacggtattggaagcatctttctccttcaggttttcttccagccattgactgaaacggtccttgtcatcaaggtgcatatagttcatgtattcatctatggaaatctgtttctgttcctcatcgttacagaatatccgggtgtatcccgagtaagtgaagagccgtgtggacgaatcgtatgcccataatcctattcttgcggctttttctacttcgcacaaatctttttgctttttttccagtttcagcctgacgacactccggcctgtgatatccctgtattgaaaaagaaaatgctcctcatcatacttgctgataatacatttgtagtatttcacgtcatcttccaatattaatttgtaattccgtgcggaaggtttgtctcctgcccgtactttgatgaattccgcatacatctcccgtgccgtttctacggggaaataagagaatatatttctccctataatatcttgttcttttataaagaagtccgtcgtattagccttgaagtctaaacaggtgccgtctttatatacgaaaaacatagtatcagccgtaatttccagaattttgtctgcatactgcttatcgtgcaatatattactcggaattttcatattaatagtatgattctcaatatactgtttctcttagcgaatttagatgcgtgatatttgttactgacagcaaatatacaaaaaactcgcaaaaaaacggcaaaatttggataaataaagtaagtatttggtattgaggagagttaagccaaattcttctatgcctttccaaatcgctaaaatgcaggataatgaaaggttaagagaaagatttgctacttatccgttgccttttttagccccggataatccggcaaaataacgcttgaccacctgcggttttaccgttcaccatgcaaagaaccctatattttgcccgtaaagataaccgtttttttccgtttttcatggaaatacaggttatgttaccggcatccggggttttattctttgttccgctataattttcataactgtaaataactctatatcaagtaattttgcaacataaaaaatagagttatgaaacagacggatgtaacggttacgttctacctcaaaaagagcgaaatgaatgacgagggacattgcccggtcatggcgaaacttgttgtcggcaaattttcagaagcggcttttagtgcgaaaatgtccgtacccgctgcactgtgggcatccggacgtgccacgggtaaaagtaacgccgcgcgggaaatcaaccggcaactggacgatttgcgagcttcagccatttccatttatgacgaactgtcagccacccgtgagaatgtaacggctgaagaaataaggaatctgttgttggggacggctttcgggcaggaaaccctgttgggttatttccggacgttcatcgaacatttcgaaaaacgtgtcggcgtgaaccgggaaaagggaacagcgcaatcttaccgctatgcttgtaactgtgtggctgctttcatccaggagaaatacaagttgtcggatgttcctttcacggccctgaaccgttcattcatcgacaactatgacctctacctacgcacggagcgccgctttgccctgggaactatcgtgttgcttgtcacacggttgaacacgattgtcggggaagccatcgcggaagggattatcactgccgacccgttcgcgggttatgaagccgaacatcccgagcgggaacagaaataccttaccgccgcagagttacaacggctgatgaccacacccctgcacgacccgaagctctaccatatccgcgacctgttcctcttctcctgctacacgggtatcccttacggggacatgtgccgcctgacgacggaggatctggaagtggccgaggacggtgaggtatggatcaagaccgcccgcaagaagacgaaaatcgactatgaagtgccgttgctcgacataccgttgctcatcctcgacaagtaccgggatatggccccggaaggaaaactgctgccgatgtacagcaacaacgaactcaaccggacgctgaaacgtattgccgccatttgcgggattgaacggaagctcgtctttcactgcggccgccatacctacgccaccgagatcacgctttcgcatggtgtcccgcttgaaaccgtcagtaaaatgctggggcatagccgcatttccacgacgcagatttacgccaaagtgaccgatgacaagatcgacatggatacccggtctttagaggaaaagattgccggccgcttctccgtagctatttaatctatcattgacaatcaaattcacaacgattatggaaccgaataataaagagataaaacgccgcagcacgttctccctgctgttctacatcaaccgcacgaaagtccgcaaggacggaacatgtaaattgttatgcaaggtaagcatcgatgccaagtcggccccgatcaatatcaacgcgtttgtcgatccatcgctctggaatccggaaaccaaaagggcgaacggacgaagcgagaacgcccgaacggtaaacctggcaatagagaaactgaccgaaaaaatcaccggacattaccgtcatattcgtaaaagcctcggtttcgtgacggccgagctggtcaaaaacgccgtggaaggaatcgggcagaaaccgttcaccctccttgccttgttccgcgagcataacgaggagttccgcaagcgtgtcggcgtggatcgcaaggaagaaacctatgaaagttacgagaactcctataatattttagcctccttcgtgaaaaaaaggaaggaaaaggaggatgtagcattgcggagccttgaccgggagttctacgatgattttgaaatattcctgcgtacagatcgtgaaatgaaacccaagacagtacacgagcatctttaccggttgaagaaaatgaccaagcgggctgtcagtcagggtacactccggcgcgacccttacgggaagctgcatccggaactgccccggcgcaagagccgccatttgaaactcgaagacctcaaaaagctgatggaaactcccgtcgataaacccaacctccagcgggtgcgggactggtttctcttcgctaccttcacggggttgtcctacgccgacctgaaacgcttgtccgaaaaagacatcacgcagtcggacgacggaacgtactggatacacatccggcgccagaagaccgaaacgccctcggccatccgcctgctgaacgtgccgttgcagatcatcgagaaataccgccacgagcgtaaaagcgacaggattttcaacctctattgccgggggtatctcatcaagctcaccagagaactgggacggacatacggcttcgacatgacctttcacaaggcgaggcacaatttcgggacacatatcacgctctcgttgggtgtgcctatcgaaactgtcagccgcatgatgggacacaagagcatttccaccacgcagatttacgccaaagtgaccgaccgcaaggtggacgaggacatgaaacggctgaaagaacagaccaaaggccggaaaataaatctctacgaggaggacgaaccggaaacggcagatattataacggtaaacggttgaacagtataacaaaaattgataaatttgtatgactatgacgacaagagaacctatcagcattgaaaacgggcgggtggaaatccacgcgccggagaaccgtgtatggctcacgcgccaccagattgccgacctgttcggagtcttcgttcctgccgtggggagcaacatccgctccatactcaaaagcggcatactctgtgaggagagggtttaccgccgggagcgcaaccgtgacggcggtattgtcgagctgtattcgctcgaaatgatcgccgcgctggctttccgcttaaaatccgggaatgccgaagccttccgacggtggcttgtccgaagggccacgacgatcgctgtcgtctggcagctccccggcatgaacacgatattgaactgaaaaagaagaacggccgtgatggccgttcttcttttatacccattcctgtcccccgatacatttcttccgggaatcttccaggaatttctgtatctcggattccatgtatagtaccttgccctgaatcaaataatagggaatgatccgcgccgtgcggtattcctgcaatgtacgcctgctgattttcagcagccgggacaattcctcgtcggtgacgaaccgctctcccttgagtgtccggcctccggaggattccagtttatccagtgccttgccggccttttccaagcgccggaagagatccgccacacgcggatcgtgcttgtcgatgaaataatggctcataacgcggcggtattaggatagtgcgacgattgcagcagtttcccgacatcttccggtttgtagaagattttgtgacggatgcggctgaaaggcagcaaccctttctcccggtaggtttgcagggtacgtttcgatatacccagcacgtcacagacatcctggttgtccagccattttttcaaactcacgtcctcctgcctgcggcataacgcctcggcttttctttcaatggcttccacgtgccctgccagcgcgtcgaaagccttcacgtccatacttattatttccatgttctgtttcattttttgtttcccggatgcccaaaagtacacaaatggacagtatcttgttatcagccagtggcatatggacgtatccgtcttaaaagtggcagcgagtggcgccatgtccggcggaaatgctcctccgccgatacgggatcgacacgctccgatacgccaatcgcccgtgaaaggaaatgttcgcgggcgatttatcattccatgcagggtgagccgtgaaccgactttcgcgagcgttcacggcatatcgttttctccccgtttctctcccataaccttttcctctcttttttttcatgccgcggagtgcggtatggaaatctgttgtcagtagcaaaggtagttacggggctcacgctgctgcaagatcgggccgcggggcggtttgccgcaaaatcttcctctttccctgcgggcgagcgtattttccgacaaaatcttgcagcagctatccccgacaccttttgatgctaccgaaacagattccatccataccggctccgctacggcataaaaaaaaagtcaaaggttatgagaaacgaagagaaaaataaatggaaacagaaatcctccaaccttccacttggcataaaggcaaaggtcgggttggcggtaaaggtcggggcggtggctttgggcttccacgtgtggggtatcgactttatttgggtcgttttgggcttcacgttctgttatgacatcctgcggggcattttctcctgccttgtttctctcgtggctctaaccggctttttctatttcctattcactcacatcttctaaattattacaggtatgacaaagtacatttcattattcggagcgactaccacggacacgcaggtgcaggtagtcaaggaaaaccaggttatcatcggtatcggtgcgggtgcgagcagaaagcgttacgtcgtttacaaggtggaacacaccgcccgtggctacgtgtaccacatggtcgataccgaaacaaaggaaatcagccaaacggacattctgcgacccctctcgcaaacattcggtatcggcaggtactacgacgacgtgaaccccgagttcatggacgctttcgaggtggctttgctcgtggggcaggcggaagagcaagccacggcgcaggccatcgccgccgccaaagagaaagccgagcatgaccgcatagcggaaataggggcgcagaggttacgccgcatcatgcccgaaggggtgcagggcgtaatcatcgccgaactcaacgaaacggaatacactgacccctcttacgagtgttcgaccacccgaagcgtgcgtaccgtcattctcggcttttcggccacctcccgcaacggcttcggggagttgagaaaggcggcggccaatttcccgcaaacggcgcacctctccgaatacgaccccaagaacgaacaccgctatcccgttttcacgctcggcaaaagtccgaaatacgggtggagtgtctgcaaactgacccactacacccgtgaagggtacatcgacaggctggcatatatcgcaggaaacgaggagaatatatgtctgcccgagccgaaagacgaaaaacgggcggaacgcactgaaacgagcgtgcaaggcgggtttatcatcgtggactattccgagaaggcgatagccgtattcggggacaccaagcccgtcaaggacgcccttcacgcactcgggggacgcttcaacgcacggctgacgcatgacgggcagaagaaagcgggatggattttccaaaagaccaaagaggacgaggtgcgacggcttctcggaaaggacgaataaatgttgaacacggggcggctcgccgccccacaataccaaaaaatcatggcacaaggaacagattatttcaaactgacgatacagaactatctcgacgcacgggcacgggaggacgaacttttcgcaccccgatacgccaacccgaaaaagaacattgacgattgctgcactttcatcatcaaccaagtacggcagagcggttgcaacgggtttgccgacgaggaaatatactctatggcactccactattacgacgaggaggacatcgacatcggcaaacccgtcagttgcaaggtagtggtcaatcacaccgtcgaactgaccgaggaggaaaaagccgaggcacggcggaacgccatacggaaggccgagagcgaagcctacgccaagttggcgaaagccaagtccaaacccaagaaaatcgaagataacaaactaatgcccagtctattttagttatgaaaccgagaacaaaattccaacagaacgtcgtggcggcaagcaaacacctgccgccgcttacccccgcacaaatcgaatgggggtacaagaactgcatcgagcatatcggacgccgcacgccgaaaggacttatcacctgcaccgagtgcggccacacgtggcagagcgaaaacggagaactcacggacaatctgttagggtgcgagtgtccgcactgccacaccacgctgaaagtggaaaccaccttgcgccgcaagttcaacgattacgagtatttgtgtatcgtaacccgctgcaagggttttcaagtcctgcgcttcgtctatatcgagtgttgggcgaaagtgggacagacacccgtttacacccatatcgaagccgtacagcggtggattgcccccgacggacgctccgcaaccttcgcacggctgcgcccgatgggcttcttcgttcacgggtggagttggtcgagcgcattggaactgcgggcggagaacgacgggaaatacaacatcacgcccacacgcatctatccccggcaacggcttatccccgaactgcgccgaagcggttacggcaaacaactccccgatgtaacccctttcgaccttatccacctgctgctctcggagaacaaggccgaaacgctgcttaaagcgggacaaacgacactcgtgcgatttttcgcccgttcctcccgcaatatcgcagactattggccggccatccgtatcgccatccgtaacgggtacgctatcgggaaaccgacggaatggtgcgactacatcgacctgctgcgatttttcgggaaagacctgcataacgcccatttcgtgtgtcccgcagacctgcccgcagcgcatgacctctacatggctaaaaaacggcggcacatgcaaatggaacggcggcaggaggaacggcgcaaggcgttggaacaggaagcctcgtttgtcgaagccaaagggcggtttttcggagtggagttttccgacggggaaatctgcatcaaggtattggacagcgttgaagccatacggcaggagggcgaggccatgcaccactgcgtgtttaccaacgaatactatctgaaagccgactcgctcatactctcggccacaatcgacggcaaacgtatcgaaacgatagaggtgtccctaaaacgcatggaggtcgtgcagagccgtggcgtgtgtaacaagaataccccataccacgggcaaatactgaaactgatgaaggggaacatgtcccttatacggaaacgaatgacagcataaaaatcggggcggcgaaagccgcccgcaaaaacaaaatagaatgaaccaaatagcatataaattcgtgtcgtgggacgttcccgcactcgaaagccttgcaggctcaaaagcgtacatattacgcaaacggctcaatgacgggggaacgctcacccgtgaggagaaagactggattacccgtgaggtaaaccataacacctatttcaaggactccattctgcttttagggtatcgtttcaactttgtcgatgtactgaaaacattcgtggtaaagcagtacgggcattacacggaatataagggcgtggacaagacgagcatacgctccatgttgtacggcagagtggaaaggattgtcgaattataaaatcggggcggcgaaagccgccctacaaaaaaaatataacaatgaaaatcatctataaaagctacatggcacgcccgctcaaacccttcggggagtgggattgggaagttcgggaagcagtcaagacggcccttgcgctcgtcgaggggaaaaacgggttcagaacccattccgagatatggcgaaggtgcaacctcgtcattaccgtgggacacaacatctacaccacgagtatcgagatacgaccacccgagcaggacgtgatacgccgcaggagcaactggcataacggctacgcctactactgcaacggcgtgttctgggcgaacatgagcagggttagagtggaacttgtctgattaaaaaatttcggggcggcaaaagccgcccgtaaaaagcgagaatatgaaaacgaatgaagtaaacaaggaaatctcctatgaaacgctgctcgtaaccttcggcgagggtatcgggcggctcgacaccatgttcgacgacccgcaggtgtggggcgttgccacgctgaagcagtggatcgacgggtatgaaactacgcgcttcaccgaaatcgacgaccgaacggcggttatcacatccgaatacaacatggacagcgtgaaggaatggctgcaaaagaacacaccgattatcaacctggaaaaacgataaaatcatgcgcaagtacaaattattcatcggctaccggctgctgggagagttttccggtatatgggaagccaaaaatttcgccgctgaaagcggcatgagcggaattttctcgctcgtgggagaaaattaccgggacagttggtacgaaccaaaaaaacaggacaagaatggaaacaaagattaaagacatcacgggagcggaaataaccgttaccgacttaaaagaggcggtacgccaatgccgggagtgcctcgcaagtccttacctgatgccctcggggcataccgtgggggaaaaccatgcctacatgttgcggcaactgctcgccctgcaaaggcggaaacgggaacacggcaggcaacggccgtgaaaatacgacgcgaaaaaaatcggacgataacaaccgtccgatttttttgtttcccgtcaatcgaccgccgtatggtcgcccagcttcccgtgcagttcacgcccgatatgtccggcaatgccacggggagaaatttcagagattgaaccccacccgccatgcgtgtatatgcacgtcttgagcggttcggtacgggaaaggtagaacagatagccgttgcggagcaggatgcccacgaacaccgagccgacctcgatgtcggcgatctcgtcaaaacgtatcttcccgtcattgtataatactgccgtgccatccgcatcgggaatgacgaacagatcgtcttccatgacaatcccgtgcaactcgattagcgaccccaggcattcactcgccgatacccggtcgtaatcactctttacctcatttgtcgatttcgtttccatatcgcttttctttaggttcagacaaataccatacgaaaaaggcgtgagaatacgttaaataccggcattgaggtacagccaagcacccatccactcgatagataatttctccccacgccgctatcgcatacgcttgacgcatatagacacgacgatgaagaagagaactacccattattttgcgagcggattaaaatttggctgttttcaatgccccaccataatgtgttccttccgtatgtaaatcgcccggcggcacgccgccggaggattcgattgcaaatataacgatttcatccgggtatcggcgacaacacgtgcgatttttaacaaccttcctgccaaagaactacccgccgtcctacaatttcggcccccgggcgggtttgcggggcgcgaccttcggctgcgccttcttctccctgggcggttcgacgatccgcagtttgagtttctccgtcttacggtcgtaacgcacctcgcagcagtcaatctcacccgcaaccgacgtccacacgttgttcacacgcaccgcgccgcccgagtagagggtcttgtattgttcgtattcgagcggctgccgcaatttcgcgtccacctgacggtggaacgagtagatattacgtccctttgctatctcgtcgggaacgtaaacccgcaactcgggatgggcggcctcggcatagaggcacagatccgccgtgcgaagctccctcggaacccactggatcatcctcgggtcgccccgcacggtcgtatcggccacgagcggcgtgatggccgtctggggaatgtcgtacagcacccccgcatccttgcgaacggcctccaacgccacctcctccgttacaagccggcggttcaggtgcaggacactcatcaaccggtgtatctgctgcgggtcgtcctgctcgcggaacacctgcaagaccagggcggggtcgctcaacgcgctgataaccgagaaatcggttttgtccttcccgtaggtacgctcgaaagcctcccggctcatctccggcgtccgggcttcgcgggggacgcctttcaggttttgcgggttctcccgcaccaggctcatgtatagatccgggcttttcatgctctcgggcaggtgggcgatggcatagggactgcgccgtatggcctccatgcacaactccggcgttttccacttctcggggacatattgcaggtagctcccgtcgtgcccgacggcccggcggcacatctcctcgttcttggcatgatcgggaaggttgtagaacagctccggctccagggcgaaaatttcccgggccaccctcggcgtgaggaaccaggggttcatgttctccaaaaaatcgaaggtcttatcgtaattcgtgcaatagaaccccaacactttcaggtgtatctcctcgaaggggatatagcggaggacacgcaggtcgtcggtacgggccaacgcccggttgcaaacctccggcgtgagctgttcggggttgaaaaagcggatggccaggggatcgcgctccagcgccatcccgcacagacggtcggttttcagatgcttcggaacgtactccagtgccaggtagttcgaggacacggcggcctcgcagacccgttccgtgcgtaattcctccggcacttcatggagtaggatgccgtccccactgacggcacgcaggcagactgcctccgtgcgcagttccaccggcacgagcgaaaggcaggacgcgtccatccccacgccgtgaagggccagttccccggtcatgacctccggggcaatggaggcgaaaatctcgaacttgtccacgaacgacatcccgaattttttcagcccttccaggcatatatcgggatacggaatgtaagggagtatcttgtaatcggcactgtccaccgctttcaacgccgtacggcatatttgcggcgtcctcaattccccgggaacggcctccagcaccaggccgttgcgcttcacggccgccatgcacagttcgggggtcttcaacccctccggaacgtaatacagcgcgtagctgttgctatcgacggcggcacggcacattttcggtgtcttcagacggtcagggacgaatttcagtgtttcgccccggtggccggccgcggcaagacaaagttccggcgttttcatcgcttcgggaacgaactcgatgttgaaagccgatttcttgatggcgaaacggcagacctccgccgttttccgatcctcgggcagcgtctcgaaaaggttctcacgccacgggttctcgtacacccccgtatcgagataggctatatctattctctcttgctctgtcatggttttcagtatttatggaaagcgcccgggtgacgggcgcttctcttggttagacatattccgttatcgttccgtttcctccgtcccgttctcgctctggaacgtgaaggaggtcttcacgacctgacccgtgttgtcctcgacatagacgtcgatggcctgctggtcatcgctgcgcgatgtgtaatagaggcggaacacctcacggtcgagcggatagcggtcgttgggcaggaacaccgtaccgtcgtccatcctcaactcaccgcgcccgtcgggctggaaatagcggatcgtgtaacgcgcgccgtcatatctcccctcccgcacgagcgtgcagcggatttcagcggtttcaccaacggagattcgcttctgaacgggcatcgtttccagagagaacgtgtacgcctgctgtatatccagcccgttgtcgcaggatgcgcataaaagacccagggcggcgatccagaccgccagggccaatatctttttcatctttttcatgtcgcttgcaagtttaatggattatgaatttcacgcccaggccgaactgcgcgtggaaatgtcccgttgtagtgccccataggatacgctcacgccccgtcagcgagaggataatcctgtcggtcaggtacgcatcgacctccagcgtgacggccccgccatagaggaaacggtcgcggtggcggagcgtagagccgtcatagagccgcctctcgccccggttcacactctcgtaaccggccagcgccgagccgccgaggtagaagaaaaaagtcctggacgggtcggcgaggaacttgtaatagtaaccgccctcggccgtgaactgcgccacagggatacgttccgacttgtaggggtaataacggttcaggaactccgcgccgaacacccacttgtcggcattcttcgcgtagcggctcatggccagcccgaaccagtagcccgtttcgctgcggctgtcccgggtatagaagccgtcggtcatgcctccccgtatttccagcccgcgcatggcgggcagggcacgctgggcgtgcgccccgtccgaaaggaggaggcataaccccagcgtgagaatgaatatcgcccgtttcatatcactttacctttaactcgttgataacacgtgcgcgcaccaggtcggcattctccaccgtgaaagtctggtgtcgcccgccctgctgctcgtgcagttccacgaccagctgcttgtcgtcggccagcgtgaacttcgggagcgtgaagaccatgcgctcggtacgcttgccgccgatgacctgcacgttgttgtacgcacgcacgggccatacgacctgctcctggatggccgtgcgtttggccaccttcttgtccgtaatcttgaacgtcaggtagtccacgttgaaaggcacgttggaggagtttttcagttggaggtggaaataaagcaggtcgttatgcacgtagatacctttgaggaggtattgtaccccgaaacgcttgcaaccgatatgcttgatctcgcggcggtcattcttgtaaatggactgcatgatcagtttgaccagcagcggagattcgcatcccaactcctgcaaatagatgtccagcgcgttattggggcggtttaccgcctccccgtcatgcaggaagtccgccatctcgaccgacagtttcaccggctcgtcggcatacttgacattgaagctgtaataggccccgtcctcggtaatgaccgaaaggttgctctcgcgcgagaaatcacgcagggccgcctttacacgcagcacgttttccgtgccgtcggctttcgccgccagaagatccgaagaccccagatcgacgtaacggatggccgaggggaaaatcacatgcacggtcttgctgaacgtcacctccagcgcgtagggcgggataacccggttgaaagtcagcggacgggtaagaccgtcgtacaaatcgcccgtggagggcttttcctgcgcgtgggcagcgaacatgcacccgataaaagcgagtgccagaagaatctttttcatactcgataaatttttgattgttgataaaaatggattttttcagtggtgtacggaagtacgtcgtttgtacccttattgaaggggcgggagcagcaggacgctgtaaccggccttgagcgtgaccttgaccgagcgcatcttcttgctcacgtattgcgacacgccctggatggcgctgcgccccaggtcggagagcagttgcgaaccggcatcgtccgtgatcgtgatactgctgcccatgcccgcgcccatattggcggcgatctccttcacggcattgagttcttccgaccccggcacgggaataccctcgttgccgttcgtgtcatagaccgacagatcgaccggaacgaccgccccgccgtgctggacagcgctgaccttgaccgtcagccgttctccgttgatcctcgccgcccccgttacgggcgtacccgaggggatgagcagatctcccgccatcatcggttccagcagccggaaagtaacctccccgccatcggtgagcgtcacggtttgctgcacggcggcacggatactgttgcgctcgggctcgcgaaggtcgctccccaccgtgttgaaaccccagttccggggcttgacgaactcacgggcgaagaccgaatcgggcagcggggcggcgagcagcgacacgatgttacggcgcacctggcgcacgggctgcacggaagccttgccggaaacggaggtcttctgacgcggggcttcaggggcctgaccgccattcatatagcgggcggcgatctcgtaggacttctccagcagcgccacctgctcctcctgggccgttttctgcgcctgctgttcttccaggcggcgttccagttcctcgatgcgggcctgcatctcgcgctcttcccccgtttcaccggcggtgtcctcgtagaaactgcctaactggcggttgatgtcggcataggcggcacgggaagtccggaaagctcccgacgaaccgccgacagagccggaagacttatccggcacggcagcgggcatgacgggctcttcctcctcgtcctccatcccgaacgcgaaatcctgcaaggagcgcatcttttcccgctccctgcgccgcatctcctcctgcacgtaggcatcacgcttgtccgagagaataccctccgattccggggtcggcagctccgtgttgaaacccgccgaaggctcctcccgttctttttcgccgggggagaagatcagccacatgcacccggcaaaggccaggaaaaagagcgggaagaccaccagcttcttccgcatctgtatctgccggggcgtgagttcctttttccccgcctccggctgtttattctgtttttcgttcgtcgtcataattgaaatcttttagatgttttacactgtcggcctcctgccgttgtcttaattccagttccagccgctcgatatgccgtatctgtatccgttccccggctcccttgccgaagcggtagatggaagacacggtaaagtagagcgacaagacggaaaagaacaagagcagcgtgaggatcacgataatccgcttatcgggcgagagcgccccgcaagcgcggcgcaggtggtcttcgacccactccccgaaagcctttattctcttctttgccatagccttatctttttaatgtacgtaaatcgcggttctccagaatctcgaatttctccatgatgaaaccctgcgggttattgtccgaacgccccgagttgatcagctcgcagcgcgtgaccagcgaacgctcggtgatgttgctctcgcggacaatcatttgccgggcataggtcatggcccggtagggataggcgttgaagtcgcacaccacggagtccacctcgatacgctggctgatgttccccgacaccacacggttgtagtaacctttctcctgcatgtcctggtaataggcgaaggcgctcttatcgaccaggaacagcgcgcggttgatgttgctctcgatggccgcacggtcgggcgagagggtgaagaacaactcgtgaaaacgccggatatgttcgcgcgcctccacggggcggttctggctcaaatcctgcgagagcgccagcatcagcgacttgcccccgtccaggacgtagatcttctcgcgctgcttttcggcgaaacggaagctcgcgaccacgctgaacacggataccagcgcgcacaggcagaggaacacgataccgaaaagccgaatctgcctgaaacttgtttcgatgttttttaatgacttgaattccattgtccaaattgttatgaatgattactgttaccttgtgttgccaggttgcgcccgttgggggcactgcccgaagccgggccaccgccgccgttaccggaggaggaaccgccaccgccgcgacgcccgaacgtgcggccgatcatgttgccggcgataccgcccgcgacacccgtggcgaatgtcccggccttgttgataccgcccatagccccgccggctccgcccgactggatcacccactcggcaacggtggggatcgtgaaatagcctatgatacctataatcaaaaagataatatagacaccgctgccgctgtcgggaatgtagttggggtcttgcagggccaggacgtccgcctggagcatcaacgtctggatcttggccagcaccgcggagaacaggtcggcgatgggaagccaaaggtacacgctgatatagcgggaaatccagctcgcgagcgtcgagtggaagccgtcgtaaatggagagggcgaacgacaagggccccagaatcgacagcacgactaaaaagaatgtccgcagcgtgtcgatggtaagccccgcggcgttgaacaacaactcgaagaagtcccggacaagctgccggaaaccggccttgatgtcgtaccacgtgcgttcggcccacatgctgataatctcgcccaagtccgtgatacccatatccgcaagccgttgttcatacacctcgtcgtccactaaccaagccttgccctcgcgcctgcgggcctcggcttccaaatcgtccttctgttgctggtatgcctgcaaatccaatgtctgcccctccagtatggcgtgcgtgccctgcaccacgggcgacatcacggcgttgatcgtccccagaaccacggtgggaaagaacatcacgcacaagccgatggcgaaaggccgcaggagcgggaacacgtcgataggctccgcgctggccagtgccttccatacccggtaagccacgtaaaagagcgcacccaggccggcgatacctttcgccaccccgatcatgtcgccgcatagcggcatcatctcctgatacaggttccggagaacctggtgtaaattgtcgaaatccatgactgcctccgttttcaggttaccaatatctgtcgttcgggttcccgtaaagtgccagcacccggtgcgcgtcacccttttcgcggctgcggatgaaggacacggagatggtcttgcgcgtgtaatagcgcgtgaggttgcggtactccagcatcttcgtgtaaacctgatccaccacgtccatccgctccttgtccgagagcgagaggccgttgccgccggttatgaccgtcttgagttccgccaccagcgcgccgccctcctccagcagccgggcgtaacccgccgagatcgccgccagctcgtccaccgtgaagttcgggtctgaaaccatacggttgaatcccgaggtgtagatctccgtgatctcgctgaccatttcgagcgtcagcttcaccttccgggcatccttgatgatgttatgcaccgatttgagggcgtcgtagtaagccttgctctggttataaatcttgatactctcttgcagcgacttgaccatgttggtcgccgtggtcgagctttgaaccgcgctcttgatgttctgaacgaggttcgacgggtcgatgaccgtccactgcgcttttgcctggtacgtgaagcaaagaagccccacgaacagcgttaaaatcaatcgtttcatccttttcattatttaattcgtgaatacttgggcggtcattccgacgcccggtaataatccccgtaggcggagagctggagcacctcgcgccccgcatcgtaggccagggcgacatacccgtagaggtcgaagtaacggatacctccccaatacttcctcacgggacgggagaagcgtgtcccgtccttgtaggacacctccacgtaaaaaccgccgccccggcgtcccgggttgcggtagatgcgaacccggggagaacccgagcggctttcccactcgcccgccacctcgtacagcgcgaagtccaaacgcgccgccgtggggtctgatccgatacacttgcgatacatggcctgccctccctttaacgtttgccctcggcgagctgcctgatcgccagttccatatcaccgcccagctcgccggcaagccgctgtacctccactttctccgtttcctcggtcgtgtaggccaggtactccgggacgctgacctccgtggcatagaccgccgactgaacgccgcccagaccgatccagacctccttgtatttacgggaagggtcgttggactggttgatcgagagaatctgcgccttctccttgtcggtcagccccaacaaggactgaatcgcgtcgaaacggttcatgaacttgcgctggtcgagcaggatcttgcagtccgagttgttgatgatcgcctccttgaccaccgggctggaaatgatgtcctcgacctcctgcgtcacaacgatggcctcaccgtagtatttgcggacggttttatacatataacgcagatattcagccatattggccgtagagagcgccttccaggcctcctcgacgatgagctgtttgcgtacccccttgagccgtctcatcttgtttatgaaagcctccatgatgatgatggtgaccacgggaaaaagctccttgttttccttgatggaatccacctcgaagaccacgaagcgcttcgagagcaggtcgatgttggcccgggagttcagaaggaagtcgtagcgtccgcccttataatactgccgcagggtgatgagcatgttgtcgatgttgaaatcctcgcggctgacccggatctcccgctcctccagctcgcggcggtagtcgtcccgcaggtactcgtagaaactgtcaaaacacggcacgatattccggtcggcgcggatacgctcgatataggcgttcacggcactgcccagctcgccgctctcggtcttcgtgatcttgtcgtcctcggttttccagagtgtcagcagcagcgtcttgatgctgtccttcttctccacgtcgaaatagtagtcgtcggtgtagaacgggttgaaactgatgggatgttcctcggtataggtaaaatacacgccgtcctcacctttggtcttacgccggatcagctcgcaaaggccctggtagctgttaccggtatccaccagcacgacatgcgtgccctgctcccagtattggcggactaaatgattcataaagaatgacttgcctgaccccgagccgcctaacacgaatttattcctgttggtaatgatcccttttttcatcggttcgtccgagatgtccaggtgcaggggcctgccgcttacgcggtcgcacagcttgatgccgaaagggctggacgaggatttatagttggtttcctccgtgaagaaacagactgcgggctcgatgaacgtgtagaacgattcctcggcggggaaatcccccgcgttgcccggcatacccgcccagtagagcgtggcggcgtccacggtgttgtggcgcgggcggcactccatcagagcgagctggctgcccacatcattgcggatatgccggagctcctgcacgtcgtccgaccaggccagcacgttgaaatgggcccggacggattgaagaccgaacgagtgcgcctcgttgagatactggtcgatccactccttgtttatctggtttccgcgggagtagcgggaaagggactgcatgttacgcgcacgtttctcgaacatacgcaggttttcgtcgctgtcttccaggaacacgtactggttgtaaaggtggtcgcaggaaagcagaagccccacgggggccgcgaacgagagcaggcagtccgaacggtcggtggaaagacgctcgtaacgggtgtccgtacccacgcgccccggcaggtcttccgtgtccgagagcgtgtgcaggcacacccgtttgttacccacgcgcagaacctcggcccccagctcgatgtcctgaagagaagtcgtctccgagagcgagagggaaaagtaccgctccagcaggcccggacaatccgccgtacccgtgatctcgtcccccgtgaggcggacaagggtcaggaaacccgaatcgttcagaatacgctcgaactgttccgccgcctccaggaattttgtcgccgattcccggtttacctctttgggaatgatgttgccccggcagagggtcgagaagtctgaacgcatgtgcatacgctccctcgtcgttttcgtcaggtagaggaagcaggcgtgggtcaggaacggacgctcgttgaaatgccgctcgtaactgcgggagaggaaactcatgtccccctcgcccgtggccgggcggtaacgctcgcggatgaaccagtcctgcttgtgtaccacgctgtattcgggcaagaccttcagggccttgcaccaggcggcgtggatcgcctcgtactcggcggacgtgacggtgaacagctccgggagttcgacccgatagacgaccgttatgtccgcgtccttgctgatgatacaaccgccttccacggccaggagcgggaacttgctttccagcgtggtggctttcaagatgtttctcatacgcggcccccctttcttttcagcaaccggcgcagggacttgcggttgagcaggtagcggggatgccggcgcgcggcgagcagcttcatcagcccgtgttccccgtaacgggcgttcaggcggaaggtaagccagaccagcaccgaagccgccgcaacgccgaaagcgatacatacccactgatcgacccctgccatgtagaggatgacgaacaccacgaagacggccagcaggccgcccgcgaaaatgaagaggtactgcgccttcaggccccggaactccacgctcttgccgattcccttgttgattccatattccataattatttgcatgacaggttggactacaagaagaaagagcgtaggatcgtcgcggcgacaatcaggaaaatacacgcgccgaaccagctcgcggcggtcttcgacgtgtcggggtcgccgctcgaaaacttgttatagaccttgatgcccccgataaggccgaccacagcccccacagcgtacacgagtttcgtgccggggtcgaagtaactggttaccatgttggtagcctccgtaatgccggcgatgccgttgccctgcgcgaaagcggaggagatggcggcaaagagaaatgccgccggaagaagaatcttgttctttctcataactcgataatgtttgaattgtggcgcggggatggataggccccgcaccgggttaaacttcttgattcggattttttcagtggttcgaggatagcctcacgcgctacccgtagtctttttctttcatcgtgatgtcattatggggttaaacaaactcacggacgtcgaaacccgtgggaaccgaaccctgcggagatgggctttccgcagacctctcggacatacgccggtgaaaggccgagaggtaggtgtcgatcagggattttaccctgtcgttcccgtcggggcgacccgaaacgatgacctcgaacatgtcggtctgtttcaggcccaggaggacacgtcccgtttcctccctttgctcgtctgttgaaggtggatcatgtaccacgtggcggtaggcttcgcccatctgttcaaaactaaccccctgggcaagcgagcggcccaaaaggggcagctcttcggtgtcgtcttcatcctcgtcataatccggctcctccgcgtccgcatccgggaaagattcatcgtacagcggaaagtcgatttccagaggttcgttaggctccccctcgggagcgacaccgaacacttcatccaggtcttccggcggaatctgccgggggtgttcgggtacattcgtgggcacaaatatatcggctttttccgtaactttttcagtttcagattctacggcagcttgtggccgggagtggcgcgggtcgaggacaaagcggctcctgccgatgatctcctgccggcagggagtgtcttcggcaacgatcccgtctgccggttcgttacgttccatccgccgcaggcggaaaaacgcccacaaggcataccccacggcaaagaggggcagcagccacaacgccccgttcatcgctcctccgctttgggttgccgggaggccacggcctcacgctcctcgaaaagccgctcgatggtttcccggttatcatccaggtgtgccttgagaaccttgtccacgtaggccgtgatcgtcacgtcgccacgaccgatgacacgggtgatctcgcggatacgctcgtgatacgacggacgtatcttcacgtgcttgttaccggcgaaaggcagccgcagcaggcagatgtaacgggccaggtactcggcctcgggggtggggacagtccccacggcgacctcccccgaagggccgtcggggacgataagggttttcatcctgcgccggtagcggcacacgcggaagatgaagggcacggcgacgcaaaggacggccgccaggataacagataaaataattgctttgtctgacatgatggattgtttttaatggattgtaaaaaatattgggttcataactaaaaaatatcggagttccgtttcttgtagagttccgaaatttcctcctgataggtcgcgaaatgctgctccagcacattgtccaggtagctatacagcgagagttcgttcttaccgataacctgcactatccgggttatacgctcgtgaaactccttgcggatatacaccgttttgccgcttcgggtattggaggaggcgttccggataaaaagacgctcgtaatcctggcctttccctcttcggcggcgtccctcctctttcgtagccggcgaggaggcggcctcgccggacggttccgatagagccgatgcctcctcctctttttccggcgtgtaaggatgcaatggccggtttcggcttttggcctggctgatgatgaaggaagcgtccaaaccgtcgtcatgttcttttccgctcataagatcctactttaacagttcgatcaattcatccacgagtttatccaggttgctgccccggatcaaagaacggtctgccgggaagagcgtggagcggaagacagagcgacggctggcgttctgctcacgacgaaaacgcttggtgtcaggcaggaaggtcttcagaacaggaagacccagctctttcattaccgcctcgtaaacctgatataactctgtcttttcacgtccgtccaccatgttccatagcatatacagccctttcatccgggacttctcgcggcccatgatatgctcctttaccacaaccgcgtaattcagggtgctttccatgacaacccggtcggcactgatcggggcgacgagataatccattccggccagggaatgaatcagatcctcgttattgatcgtaccgggaaggtcgaagaacacataatcgaaatcaccttgcggcaggaggtagtcggcatcggccaacgcctctttcgtgttgctttccacgacaggataggctttcttttgaagccgggtgaattgttcgtaagctaacctcttgtaatgttcgtcttcgagggcaagcttcaggtcacgttcccgcatctccacgatggagtgttggggataatcgcagtcgatgaccgcgacattgaaaccctttacatagtgcaggtaagaggctgccagcaccgtgagggtggttttgcccgctccgcctttctgggtggagaaggccacgaatttcgttttctctttcattgttccatgcgtttttagttatacaatcgggtaatcgttcatctcttcacgtatccgggcaagtgacggcatgagattttatgctggtatgccggcacgcatatatgctggtgcgctggcaggctgttacgccggtatgccggtgcatgggcgcgtgtccgattttatactcatgcgcaaccgcatttgcttatccggacaaagacccgctttttcctctgcacacgatgttttctgcatccgtccgcacgtgtgcggacaggaggatgtgtcattgcccgtatccgttctcacgtgcaaagtaaacccttaaaaacacgggttgtatgctctttttccgctatggccgcgtgtggcgtcaaagtggacgcaagtggcgtaatcgcttatagcacaagtgattgaataggtcggtatctttgcctcgtgaacgatcccgacgctaatgaagccgtccttgccccgttttacggcggctctttcaatattctgtccgcgagcgggcagaaagtatttgcaaagggcaaatagcaagctgtgttttctgctgcacgattctcgttttgcagcagaaaacagcttgcccgcaagggggagaaagcacctccggagtcggtgcttttcagaagggcggcaagccgcgaagggatcggaattttcaggaaccgggaggctctggcctctccttaaaatttcgatgcgatggaaaagaacagaaagccccgagggggcaaagggggacgacccgcgaaaaacgacccggccgtttaccgcttttcggtaaacttttcagccgtggaacatgcccgtttcctcgacctttacgagcagtccgggctattgtccaaagccgcttttatcaaagcgagagtgttcaacgaggcgttccgggtggtaaagaccgaccggggaacgctcgaatacgtggcgaagctgaccgctttccacgcccaattccgtgccgtgggaacgaattacaaccaggtagtgaaggagctgcacgcgcatttttccgagaagaaaacactcgcgctgctctataaactggagagagcgacacgtgaactggcggccgtcgggcagcaggtcgtgtcgctctccgaagagttcaaacagcgatggtagccaatatcaccaccggaaaagacgtgtacggtgcgctggcgtacaaccaggagaaagtcgatcggggcgacgggaaggtactgctgacccacatcgtgagggagccggtggatgggcgcttcaacgtggccgcgacggcagaagacctcctgcgctggatgccctcgcactaccggacggaaaaacccgtcgtgcacgtgtcgctcaacccggctcccgaagaccgcctcgacgacgggcagctcgcggagatagccggggcctacatggagcgcatgggctggggaggacaaccttatatcgtattcaagcataccgacatcggacgggagcatatccatatcgtgtcggtgcaggtggcccaggacgggcgcaagataaacgacagcaggcgcaacgaacgcagcgtggccgttaccgaggaactggaacgggagtacggactgcatcccgccaaagggagaaggcgggagaaagggcaagggatcgtccccgccgattacacgcggggcgacctgaaacgccaggtggcagcggtaataaaaccggccgtggcgacataccgcttccaaaccctcggcgagttccgggcattgctgtcccgatataatataggtatagaggaagtccggggagagcggaacggaaccccctaccggggattgctctacacgctgctggacgagaacggggacaaggcagtggccgcgccgctcaaatcctcactgttcggtaaagaggtcgggtatgacgggctggaacggcacatggagcgcagcgccgaacggttcgggaaggacgacacgaggaggcaaatccgtggccgggtcgataaagcgcttcggggagaacccacggaggaagaactgcgcgaacgcctgcggggagcccgggtggatctctacatacgacgcaacgaaaacggccgcatcgtgggtgtgacgttcattgaccacgaaacacggacggtcgtgaacggatcacggctgggaaaggcatactcggccaacgccttcgagttgcgcttcggcggaaaacggaatcccggggaaaacacgaggggcttgtccccgaaacaagtgcctgccggacgggacgggcaacggaagcggaatacctcacgacggaggaaagtataacatctcaattatcattcatttattaaatcttacggttatgcaacaggaagacgaccttcggggtcttgcaaaaacaatggatttcatgcgggcattgagtatcttgttcgtggttatcaacatctactggttctgctacgggcagatacgggaatggggaatcaatatcggcgtggtcgataggattctgctgaacttcgaccgcaccgcggggctgttccggaatatactatggacgaaacttttcgccgtcgtgttcctcgccctttcatgcctcgggacaaaaggagtaaaagaggagaaaattacctggcggaaaatcacggcatcgctggccacgggaggcgtgctgttcttcttcaactggtggctgctggacttgccgctgacggcggtggcgaacgcggctttctacatactgaccctatcggccgggtatatctgcctcttgatgggcggcgtgtggatgtcccgcctgctgaagaacaatctcatggatgaccctttcaacaacgagaacgaatcattccagcaggaaacacgcctgatcgagaacgagtactccataaatctgccgacgaaattttactataacaaacagtggaacaacgggttcgccaacgtcgtaaacccgcaaagggcttgcatctgcatgggaagcccgggtagtggaaagagttattgtgttgtaaaccagttcattaaacagcaaatcgaaaagggctatacccaatacatctatgactacaagtttcccgatctttcggaaatcgcctacaaccacctgctgaatcaccagaaaggttacaagaaaatcccgactttctacgtcataaatttcgatgacccgcgccgctcgcaccgctgtaaccccattcacccggacttcatgaccgatatttcggacgcctacgagagcgcctataccatcatgctcaacctgaaccgaagctgggtgtgacctgaaaagtcacgtaattgattgttaaacagcaatgtatattgcaagatttaacccgctgttccgtcagcggtagcctactataaggtgcatctccagtgatgggttgtgctaagcttataggacaaagtacactttccgaaaggacaagactgaaccgtgagggaacgtcaagggcggttagtatcataccgtcgagtggcgaggctggatagcatggttaacgtaatgtgaactgactttagccgtcgtaaggtttgaaggagcgcaagatactttagctctcaccaaaaggtaagcagtcggataaccctcgcccatgttggggttacacggacatagcactgccggcggacttggcagaacctaaactatccgtttgtcaattgcgtggaacagggcaagcctgtatctctctcgtaataatgcgagtaagcgaaccgcaaggcaagccgaatggggtgcaggtatgagataacggagaaagcgaatgccgccctgtaatggggaggatacggattgaaccaacatcacgagttaatgagggtaacatcatccgacacgaaagtgggcagacttccgtatatggtaactctttacaagataacttttagaactttcaaaaggaggaaagcaaatgaacgagattaaaacatcgtgtgcgcctgctgacagcaggaatctgacttgggacggtatgaactggtctaagtgtgaaacctatgtccgaaagctacaagcgcgtattgtaaaggctcagaaagaaggcagacataacaaggtgaaaaccttgcagtggatgcttacccactctttttacgccaaggcattggcagtaaagagggttacttccaacaaagggaagaatacgtctggagtagataaacagctttgggactctcccaagcgcaagtacaaagcaatcggtgaacttagacgtcgtggctaccatccacagccgctccgtagggttcacatcaagaaaaagaacggtaaactccgaccgttgggaataccgaccatgaaagacagggcgatgcaagcattatatctcatggcattggaaccgatagccgaaacgacaggcgaccgtttttcttacggcttccgaaagaagcgcaggacaatggacgcaattcgtcagattgatacggttctaaatcgccagcattcccccgaatggattttggagggagatattaagggttgcttcgaccacatcagtcacggctggcttattgaaaatatccctatggataaaacaatactcagaaaatggctgaaatgtggagctgtattcaatggtaaactgttcccgacagaagagggtacaccacaaggaggtatcatatcaccgacacttgcaaatatggcacttgacggacttcaaccactcttggctgaaagattcaaaagacgtttcatcaactataagacattccactacaaagtgaatcttatcaggtatgcggacgactttataatcacaggtcgagataaggaattattggaaaacgaggtcaaaccaatggtgatagaatttctcaaagaaaggggtcttaccttatccgaagagaaaactaccattacgaacatatacgatggatttgatttcttaggtttcaatgtaaggaagttcggcaaaaggctgtacacatctccgtccaaagatgcacagaaacgctttagggcaaaaatcagtgacatcgttaaaggacataaaatgtgtaagcaggaatcgctgatacgaatgctcaatcctgtgataacaggttggggaaactattaccgatatggtgcatcaaccaatgcttttcacggttgcgacaatcacatttacaacctcacaaagaaatgggctttacgtcgccacccaaagaaacgcaagtcttgggttgcagataagtattggcatgaaattcgggggcgtaaatggacgtttgcatggaaatatgaaacaaaaagcaagaaagtgaactacctgacccttaaaaggttgtcggatatacattatactccgtacaagcaagtcaagggggaggcaaaccctttcgacccggaatatgatgattatttctttcagcgaaaggagcaacaaatgctggaatctctcaaaggacgtaagtcactcttatatttatggaacaagcagaagcggacttgtccgttatgcggcaaggagatagattgtacaaaagcatggaacgtcaatgaaatatctgttggtggttcaattgtacggcaacttgtccataacaactgctacaagcgaaataaacgaaactgttgaaagtatgagccgatttctaacaacaaatagaaatattgagttgcttgagccgtatgaggggaaactctcacgtacggttcttaggggagaagggggcagtaatgcccttgacttacccgatgtgcagaagcagggcgatttttttgtggaaagccccattatccttttcgcggccgtgatctggttcctgcgcatctacgacaacgggcggtattgtaccttcccgcacgccatcgagttcctgaacaagcggtacgaggatattttcccgattctgacatcctacccggaactcgaaaactacctcagcccctttatggatgcctggctcggaggcgctcaagaccagctccagggccagatagcatcggccaaaattccgctttcccgcatgatttcgccccagctatattgggtcatgtcgggcgatgacttcacgctcgacatcaacaacccggacgatcccaagatactctgcgtggggaacaaccccgacaggcaaaacatttacggagcggctttgggattgtataattcccggattgtcaagctcataaataagaaaggccagctcaaatcgggcatcatcatcgacgagttgccgacaatctacttcaagggactcgacaacctgatcgccacggccagaagcaacaaggtcgccgtgctgctgtgcttccaggatttttcacagttgaagagggactacggggacaaggaggccgccgtcgtgatgaacacggtgggcaacatcttctccgggcaggtcgtaggtgaaacggccaagacactctcggaacggttcggtaaggtattgcagaagcggcagagcatgacgttgagccgcagcgacaaatcgacatccatatccacgcagctggacagcctgatcccggcctcgaagatctcgacgctcacgcagggaatgttcgtcggggccgtggcggacaatttcgacgaacgtatcgagcagaagattttccactgcgagattgtcgtggacaacgaaaaagtgaaagcggaaacggcccggtacaagaagataccacaaattaccgatttcacggacgagaacgggacggatcacatgaaacaggtcgtgcaggaaaactacgaacgtatcaaggcggaggccggccgcatcgtcgccgaggaactggaacgtatcaagaacgacccggtgctttgcaagctcctgccggaacagaactaaatgaacacaaacacccccgcaaacaacctccgtgaccttaacgggggctgtttcctggttttataaccgcacagccggtgttttggagcataaagtagtgattatgtgaacggaaaacattatttttgtgttcggaatccttttaattataagtatgacagttaccgatatatacgaagcaatgaacagcaaggcggaagcgtttttcgagtggttgcaggctcacccgaaatacgggttgctgtttggtgtcgggttgcttgccctatggcttgcagggttgctgttccgttggaaatgggcgtgtcattggcagtttaacagcaaactgtggttatttgacgattgcaagcctgaaacacgccgcagggttcagattgtgttggtcagcgttctgattatacttatattggttggtttctttgtatggagataacggtatggaaaaggacaatcgcaaataccggatctgcttcatcgactatatgtggtatgtagccgagatatggcacgaaagggagcgtaccaatctcaacggacgtatgctactgttttggtgctggctcttcgtcctactcataccgcttggggttccgccgatattgcgccttttcggctggatgattggtttggccatagtgattcctctctgctttcttcccgatttattctgcaagctacgctatacagccggacggcgtgaagcgctccgtgaacattacgggaagatgaaacatcccggcaggaagctcgccaaaatagttcttatcgctatcgccctgatcgtggcaaatgtagcgctgatgttccacctcggatttatacattgggcatgatgaaacggcaggagaataagcaacggttctatctctgggactacctctggtggatgggggagaaattggaacaagcaagacgaacaggcagggtcgatggcgaaatgatgctctcgatttatatcttcgctcttttgatattccctatgatgactgttactatccggctttttccaggtgtgtcggcattgttgccatgtgtcgtttttagcattgtcacatttgccgttatgtcgctcgtcagcaggatttacaaatggcgaggcaaagcagtgatgtctcactatgccaagtgcaggtttaacgaactccttgcggttctgttatttttccttgcgatagccattatctgctttatgatgtatcttcttgacaaaaagtgaaacaagctttgatacgaactccgggccgttatatcgaatggtctaactcgatgtaccagtttcccttgatgggtttgtaaagcgtggtgtcgttgtacgtcctgcggtagatctcgttcaggtcgccatattcggtgatacggatattccgacggcttctcaatccgggatcgtaaacgaaactcttggacgttcccgcatccacgatgccgtgggagtagtacggcataacaaggctcacatataccgaatctgccgttccccattccctgcgatcaacaaggataaaaccgcatccaatctctgataacaaggagtcgagtaggattcgctccggcttcaacagtccatataccggaatgtcttgttcgtcattcgtttcatggaatgtatcgctttgttctgttgaatcaagtataatgacctctcccggagatagtggcggatagtgaaaactaccttctgaactctctgccatgatttcgtacaccttacggaacgccgcctcgtgcgtggcgaagtggcgtatcatttcctcgtccgacggcggcatgggcggctctccgcagcttacggcaagcaggattacaaataacaggattatgactggtgttctcattttctaatgtttaatgtttggtggctaaccgacctttcaggggagattgagccgcttgttactaatttttttattgtgtcaattcattattagttttacaacagaccaatgacatttgcaacaataaatattatcgctatgctgttctattccttctatatctatcattgggagttgtgatttctttcctttcatcacaatctcaaactcattgaaatgccaatctttgagttcttgtttttctattgtgaagccataactctgtaaaagtgttgtaagctccattataggattgcatattgatttgtattgacacatattattttttctttattagtaatgttcggcggataatcgaccttttaggagagattaatccgcttgttagcaacttcttttcgttttatagattatttcagaatatccatttggaaatgatttggtaatagtttctaaagtcccatcgtcttgatattggaatatgtgaactaaatcactaccacttttaccatcaatatcatattgtttgatttcaatatgtgtcaaagcgttttctttatagatataattctcttcacggctaccatgactaccacataactgtaaccgtttcaactttccgccctcgaaaaagttatggcatacattcatcaaatgtttaccattatcatatagaatacttttcacaagattgtctgtataatatagaaaagtgtgataaaactgattttcaatcgaacaaccaaccttaacttcgactatttgattttgattattaaacccgtagatacaaagatttttggtgttttttactgtatcaggacgctttacaggttttccttgtctgaaaccatgacgctgataggaatatggggtaagctcataaaactcgcccttatacaactcagtcctgacaacatcgctttctatttgttgtcttatgatttcaaagtcatttttcaatgcttcaaattcagttcttaaagtctcttcaatcatttccatttattttgggttgctaatgttatactatcagccgatttggctgttattttcttcaagtatcaagcctcgttttcctccaatagtagatcgtccaacgggcttttgatattgcttttgaaagtgtctgctatgtggacatacctttctgtcgtcttgatattgttatgtcccataagctctttcactatcttgatgtcggttccctgctccagcaggtgagtggcgaacgaatggcgtagcaggtgcgggtaaatccgtttcgtgattcccgcttcccaagccgcggccttcaaccgtttcgatacgatactctcggtgaaaggttctcccggtctgtgttcaaagagccacactttcggtttgtatagtctgttatattccgtcagctttttcatcaacggttttgacagcagggtgtagcggtctttttttcctttaccctgccgcacccgtatcagggagcgggattcgttgatgtcgccgggtttcagttccagcagttcgctgatgcgcaatcctgcggaatagagtatggagaacatgcagaagaaacgcaggtctgtcaccgtcacatcgagtattttctttatttcctccttgctcaacacgtcgggcagtgtcttctcccgtttggcacggttcaccttgtaacaccgccgttcctgaccgagaactttctcgtaatagaacttgatggcgttgatacgctggttttgctggcaggaggatatgtttttctcgtggatgagatacagcaggtagtcgtttatctcgccgggagtaaccgtttcaatcttacgcccctcgaaatgctgttggaaatcgcggaaataggaggtatatacccttacggtatggtcactgtaacgcacttgctgaagtttttccagatagccttccggcagtggcggccgtttgtcttcctctttacggggtgcggtttccttgatggcagaatagtctataaacgccatttttacatagcggtcgaagaactcggcaagcacgaaatcttctgccggcagataagccctgccgccgacaagcagtacgttttcttccttcgacagcgacaagcggatgtcattgtcattaccgaaagtcacttcgacaaattctctcccgtttcttatcaccggagaaagtttgatcttggtttttggggtatatatttccatgcctcacgttttgtcggatattgaaacccgttttcgcaaatttataaaaaaacacgggttatccatgcgctttattgacatttaacaatagatcccgactacctgacaaataaggtgaggagccacgaaaataccctctgccaaatccgtccttcccggcactccgtttctccgatttcctctgccctgcgccacaagcggccacttctgtgcccgatgcttccatagcctttccaactcttttacgttcagccggttccccttactttcgttcccgcatcgctattggtgctaactaaaaacactcgtaattatggacgaaaacgtaaagaacgacgctaaacaagtcatgctcgttcagaatgccgacgacggacgactacaagccgttaccggcgtggatcaggacggcaatatccagaccgccgaccccacggatcagaacgtggcgagcctgctgaacgtgaacacgcaggattcagccctcgaagccttcttcaaaaagttcatggaacaggcccagaaccccgtccacacgggtatcttcgtcatgacggagaatgccctgaacaaacttatccgcatcgacttcgacccggagatcctggaaaattaccgtatcgacccctccgaacggcttcagacgcaggagcagcggcagttcgagccgctggacgtcacgaagatagacctggcggatatggagaagaaaggtatccgcatggaggacatcgagccgcacctgaaagccatgtcttacggacataaatccaacgggctggtggagatgaaccccgaactggagaacgggatgcgtgtttccaccaaagggcgcgtgtcgctcgaagagcaggcggacggctcgctgcgcgtcgtgccgcattactggcaggaacgacccgacctcgacgcccccttccacggggtgctgctcgatgaggaggcgaaaacgaacctgatgaacacccgtcatgccgggaaagtgatcgacctggagctggagccgggcaagctcacgccctgctacgtgtcgatagacaaatggacgaacacgctggaacccatgcccgtttcgttactcgaaaaacgtgcccgcatcaaggaggccgacctctcggaaggcaagcagatggatttctacggcggcggcaaggtgttgctcgaaggatataccacccgcgcgggttataagcgggatgcctatatccaaatcgacgcggccgaacgtaactattcctttacctacgacggtttggatcgcaaccgctacgcccaggagaacaaggagatttaccgccagaaggccgccgagaaaaacggacggcaggaaactacggcctccgaacgacagcccacgctcacgattcaccggacaatcctcaaagcctccgtgcccaaagaggcttatgaccagtggacggaagcggtgaatgatccctccaagcgggcggatgtcagggctttctacatcaagggcatggtcaaggacgggcagggtgagccgttcaacgcctgggtcaagcccaacttcgagcgtaacaagatggacttcttccgctggaatcccgaccgtgcgaaacggcagggggcggaggtcaaacccgccgttgaaagccgtacccaggtcgccgtcaattccgagggcaagaccgtcgaagcggtcaaaggtgtgaaagagccgctcaagcagggacagcaggaagccaccccgacgcagaggagaaattaccgcagtaacaagaaaaacaactccaaaggcatcaaggcgtagcgtatgaaatggttctacatgcaggccggagccatgccgctcctgatcgcggcgctggccgccttgtatttccggccgggtaaacgcagccccccccggaagaggcggacgacggacggcagtattacgacgggaacggcaaccatgtctattacgaccgccggctgatcgcccgtccggaaaaagagaaagaagaacaataacaagaaaacaaccactgaaaaatccgaatcatcatgcaagttattatcgcagaaaagccctcggtggcgcgtgagatcgccgccatcgtgggagccacgaaccgtaaagacggttttatcgagggaaacggctatgccgtaacctgggccttcggccacctggtcgggctggcaatgccccaacagtacggcatcgcgggtttccgccgggaaaacctgcctatcctgccatcatcgttcatcctcctgccccggcaggttcgggagggtaaagagtataaggccgacccgggtgtcgtgaagcagctcggtattctccgggaattgttcggcatggccgagcgcatcatcgtcgcgaccgacgcggggcgtgaaggggagctgatcttccgctacatctactcttacctggaatgccgcacccctttcgtgcggttatggatcagcagcctgaccgaccgggccattcgcgaggggttacaacacctccgccccggcaacgaatacgacaacctctacctctcggccaaagcccgcagcgaagccgactggatcgtcggtatcaacgcctcgcaagcgcttgccgtggctgccgggcggggtgtctggtcgctcggacgggtgcagacccccacgctggcgatcatctgctcccgttacctggagaacaaggcgttcaagcccgccgcctatttccggctgaagctctccacggcaaaggagggcacggagttcaccgtcctctccacggagaaattcgacggcagggagaaggcggaagcagcccgcgccgaggttatcggcgcccgaacggtacgcgtcgtgaacgtggagcgcaaggaggccagggaacagccgcctctcttgtacgacctgacgacactccagaaagaggccaacagccggtatggtttttcggcagaaaaaacgctcgacatcgcccagtcgctttacgagaagaagttcatcacttatccccgtaccggctcacgctatatatcggaagatgtggccgaggagattccggcactcatcgggaacatgacacgctatccccgtttcgcggaatacgcgggcaggatggataccgcatctctctcccgccgaagcgtggacaacgaaaagatcgccgaccaccacgcgctgcttcccaccgagaacctcccctccgaactggatgccgaccaccgcatcgtctatgagatggtcgcggggcggatgctcgaaaccttttccggggcctgcgtgaaagaaaacactttccttaccctgcaaagcgcgggacatgatttcacggcccgcggcagtatcatggtcgagacgggctggcgggccgtcctgaatgaacctgtcgaagagaaagaggaggacatgaccctccttcccgacatcgtgcaaggcgacgagctgcccgtcaaagaatgcggcacggaacagaaacagacccggccgcgcccccttcacacggaatcaagcctgctggcggcgatggaaaccgccggacgcgaactgtccgacgaggccgaacgcgaggcgatgaaggatgccggcatcggcacgcccgccacccgtgccgccatcatcgaaacgctctttgcccgcgagtatgtcaggcgagagaaaaagtcgcttgtacccacggacaagggactggccgtgtatgccgtggtcagggacaagaagattgccgatgtcgccatgacgggcggctgggaactggccctctcgaagatcgccaccggggagatggacgccccgacgttccatcgcggtatcgaagtcttcgcctcgcaaatcgccaaagaactgctggaagcaagaatcgacgacgcggagagtgacacagcctgcccgcgttgcggcaggcccgtggtgttctatcccaaactcgccaagtgtcagaatcccgattgcggcctgaccgtatggagaaccgtggcccgcaaggagctgaccgacaagcagctcgcggaactgctgaccaaaggcaaaaccggcacaatccgaggattcgtcaaaaacggcggcgggacgttcgacgcggccctcacgctcgatgaccagttcaagacctcgttcgttttcgagccgcgcgatactcccaggcagggaaagaggaacaaacggaaataatcgttacctttgccactggaaaagacctgtcataacgagatacgcttgtttgataaggattttttcagtggtcggcgcttcgggtgggaacccggggcgcctttctcttccccgattatcaacgaccactaaaaattcttatcatgccagacaagcaacaccatacccccacgggggaattgtcctattacggactttcgttactatcctacctcaaggacagccacccggaactcatcgccgaaggtgaattcatcgccgagcgggccgacagcgccgcccaagcgtacagcgaggcgatccgttcgggctgcaaccacatcgaggccgaagaaattgcccgcgaggaactctgccgcggactgcacttttcaccctacaacacgctggtaaacatcctctggagggaattcgaggcggagattcccgaggataccgcccggcaggcggctctacgcctgctgcccctctgccgcggagtgctggagaagtacgacctcacggacgacttcgccgacacgcccgactacgaactgttctataccgaactgacgggaaccgtccaaatacttctcgaagatggcattcaataagaaaacccacctccgccagaatatcgacgcgctgaagacggccttcacgctcgacagggaacggcgggcgccgactcccgaagaagaaaggacactcggcgcatacagcggcttcggcgccatcaaggaagtgctggaaaaccccaccgggaaaccggacaaggacggcatggcaacgctcgtggccgagttgcacgaggtcatcagggcgaacacccccgacgaacgggaatacaagcgctacatggacgggatcaagaactccgtcctgacggctttttacacgcccccgaaagtggcagacgccatcgtggaggcgatatgggatacgcggatcgccccccaacgtattcttgaccccagtgcgggaacgggggttttcgtcaatgccgtggatttccacgacccctacgcggagatcacctgcttcgagaaagaccccgccacggggttgatcctgaagcacctgcaccccgaaaaacgggtgcggatacagggattcgagcgcatcgaacccaaatacgccggttactacgacgtggccgtgagcaacatccctttcggggacgtggcgctcttcgacccgttcttctccacccataccgaccccgtgcggcggcaaggcacacgggcgctgcacaactattttttcatgaagtccgtcgatatggtacgcgagggcggcctggtggcattcatcacctcgcagggagtattgaacgccgagcagggacgccccgtgcgcgagtggctgatgaaccgctgcgagcccgtatcggccatccggctgccgaacaacctctttacagaacacgcggggacggaggtcggcagcgacctggttatcctgcaaaagaaagccgccatgggggaactgtccgaacggcagcgggatttcatcgaatcccgcaagctgtcgaacggcatccggataaacaaccttttccagtcgttcgacagggtgatccataccgaggccaaagtaggcaaagacccctacggcaaaccggcgatggagttcacccacgcggagggcgtggacggcatcgaccgggagatgcggcgtatgctctcggaggatttcaaccggcatttcaacgagagttattgcctggaacatgctccggaacagacacccggtacaccggagcgggaattgtcccgtccccgtcaggcggaacgccagcgtgccgaaagacacgagccccgccttgccggagaaatcgtcaaggagattatcgccgacgcccgtaaccttcagcagcagcgggaagaggaggaaaaacgccgcgtcgtcgccgaaatggcggcgcagggctaccatgtcgataccgaaaccggggagattacccgaatcgaaaacaaacccggacaagcgttaccggattctgccgccacacccgccggagaaccgaccggggaggatctggccgacttcggggcctggtcgaaggagcgggagaatcgcttgtgggagcagcacccgccgaaacccgaagatttcggcatggcggatgctcccgtgcagcacgtgggcggaacaacggaaccgaaaccgcgggagggcttcgccgggtcgcttttcgacacggtggaaacggcggctcccgcacctgccacccaagctgccgaaccggtaaacgtgcagcaggaaccgttgctgacgctctacgatctgttcggcttcagcgccgaggagcggcggcaggcagaactcggtatatccaagaaaaggaacagccgccggggagcaaagcggaagacgccccgacaaccctcgttattcgccccggcctcctctccggaggaacagaagagcgaaatgccgaaagcgacgccaccggagcgtgatcccgaagacttgtatgcctccctgaactgggaggacaacccgccgatcaacggcttttacgagatgatgatgtcgcttaccccggaacggagggcggaattgcgccgacaaagcgcccggcagcaggaaaccccggaacagcgggaacggcaggcggtacgccccccgacggaagccccgaaagacaaacggaaacaagccgtcggtacgccgagaacgggcagcttgttcgacacgccggaaaatccggaggaggaagaacccggtaaagaaacgccgcagatacgggaggcggatatgaaaccccgcccgttcgagggtgaggtcgccccctatttccgcgaggggacactcgtcacggacggacaaaaccgggtcggctacctgcgggggattgaatccctgcaacccatgttccacccgctggaactcacgcctgcacaacggacgaaagcctccatgtatatcgagatacgcgatgcctattaccacctttataacaacgaggcggaaacgctgacggcgaaccccgccctgcgggagatgctcaaccggctttacgacaatttcaccgaacgcttcggacggctcaatgacaaacgcaacctcgacctgatcaagatggacgcgcggggaacggagattctatcgctggagcgttacatcgacggcaaggcacgcaaagccgacatcttcgagcgtcccgtggccttcaatcccgatgagatcacgcacgccgacgacgcttcggaggcccttgtggccagcctgaacaagtacggccgggtggaaccgcactacatggcctcgctcacgggaactaccgtggagggaatactcggggaactgaaaggacgtatctattacaacccggaaacggacggctacgaggttgccgacaagttcatcgccggcaatgtcatcgggaaagccgaacggatcgaggcgttcctgcgggagaatcccgaccacgccccggcccgggaatcgctggaggctctgcgcgaggcgacgcccaaacccatcgctttcgacgacctggacttcaacctgggcgaacggtggattccaaaaggtgtttacgagcgtttcgcctcttcgctcttcgatacggaggtgaagatcaccttcgcctccaacctggacgagtacggcgtgaaggcggaagcgacgaacgtgaagatcacggagcagtatgccgtcagcgcgcagacccgtaagtacaacggcctgcaccttttgaaacacgccctgcaaaacacttcgcccgacatcaccaagaccgtcctcaaatgggtggacggcgaacggcgggaggtcaaagtgcgtgacggggaggccatacagctcgccaacagcaagatagacgagatccggggtgctttccccgaatggctgcgcgagcagtcgtccgacttcaaagaccgcctgacagacctctataaccgtactttcaactgttacgtgcgcccgaagtacgacgggacgcaccaggaattccccgacctcgacctcaaggggctggggatagacaatctgtatgacagccagaaggacgcgatatggatggacaaactgctcggcggagggataatcgaccacgaggtgggcggcggaaagacccttatcatgtgctgcggagcctacgagaagaaacgcctcgggctggccaataaacccatgattatcgggctgaaagccaacatccatgaaatagcccggacgttctgcaccgcttacccgatggccaaagtcctctacccgggcaaggaggatttcacgccccggaagcgtgagcgcatcttccgggagatacgcaacaacgactgggacgccgtgatcctctcgcacgaacagttcggcatgataccccagtccccggagatacagcaggagatattgcaggccgagctggactgcgtggaggagaacctcgaagtgctcaaagcacaaggcagggacgtttcccgcgccatgatgaaagggtgtcagaaacgcaaggccaacctggaagccaagttgcagaaggtggcgcacgcgctggaaacacgcaaggacgacgccgtggacttccgcctcatgggtatcgaccacctctacgtggacgagagccacaaattcaagaacctgactttcacgacccggcatgaccgggtggcgggcctcggaaatcccgaggggtcgcagcgggcgctcaacatgcttttcgcgctgcgtaccatacagcagcgcacgggccgcgacctgggggcgacgttcctctcgggaacgaccatctccaactcgctcacggaactgtacctgcttttcaagtacctgcgcccgaaggaactggagcgtcagaatatccgcaccttcgatgcctgggcggccatatttgccaagaaaaccatcgactacgagttttccgtgaccaacgaggtcgtgcaaaaagaacggttccgatatttcatcaaggttcccgaactggccatgttctactccgagattacagattaccgctcggcggaggatatagggatcgaccgaccgcaaaagaacgagatattgcacaatatcccgccgacaccccagcagacggagttcatagaacggctggtgcagttcgccaaatcgggcgatgccacgctcctgggccgcctgccgctctcggagcgggaggaaaaggcgaaaatgctcattgccacagactacgctcgcaagatgtcgctcgatatgcgtatgatagaccccgaactatacagcgaccacgtggacaacaaggcgagccactgcgcccgtatgattgccggttactaccgccgtttcgaggcgtacaaaggtacgcagttcgtattctccgacctgggaacctacaaacccggagcggggtggaacgtctattccgagatacggcgtaaactcgcggaggattacggcataccccaaagcgaggtgcggttcatccaggaggcgacctcggaaaaagcgcgcaaggagatgatcgccggtatgaacgccggaaaaatccgcgtactcttcggatcgaccgagatgctcgggacgggagtgaacgcgcagaaacgctgcgtggcgatacaccacctggactgcccctggcgtcccagcgacctggagcagcgcgacgggcggggaatacgcaccgggaacgagatcgccaaactccatgccgacaacaaggtggacgtgatattatacgccgtagagaagtcgctcgacgcctacaagttcgggctgttgcacaacaagcaactgttcatccgccagctcaagaccaacaacatgggaagccgtaccatcgacgagggggccatcgacgaaaagagcggcatgaatttttccgagtatgtcgccgtcctctcgggaaatacagacctgctggacaaggcccgcctggagaagaagattgccacgctcgaaagcgaacgccaggcattcgtgcgcggcaaatcatcgagccgctacaagctggagcagatcacggagaagatagagaagaacaacgacctgatacggcgtatcggcaaggatctggaacacttcaaggcccgcgtcgagttcaacgaggacggctcgtaccgcaatcccgtgaaactgaacgggctggaaacctccgaccccaagctcatcgggaaacagctcaaccatatcgccgaaacggcacgcacgctcgacaggctcgaacccatcgggagcctctacgggttcgagctgctcgtccagagcgaaacgaccgggaaagacgggctcgacctggtgcagaaccgtttttatgtccggggtgaaggggattatctataccagtacaactacgggaatatcgcctccgacccgcgactggcggcgatgaacttcatccacgcgctcgcgaccatcgagccgacactggaaaaattccggaaaaagaacgaggaactggagaaagatattcccgtcctgcgggaagtggtggaaagttcctggcgcaaggagcccgaactgacggccctgaaagctgacctgacggaaatagaccgcaggatacagcaaagcctcaaaccgatagaagagagcgagggaaaggaggcggaggaggataacgacgtgtgccgggaacggcatgacacggcggaagagctcccgaaggaagacaacacggcggcccgtattccttcccggctgcggcagattgccgacgcctccggggggcgcatcgtgatcgcgggcgtgggcagcccgccggagaacggccctgcgaagaaagggatcaagatgtaaacgaaaagccgacggaagtacagatttccatcggcttttttcatatgtccgtgagcgttgtcgtcacacttcctgcaagagtgtttgcagctcctcctgcgtgggaagataggtcatgtactgggcggcgaagacctgcttttcatcttcgggcagcgtataacggacgaccgcgtcgtttttctccgcgcagaggacgatacccaccggagggttatccccgggattcatcaactcacgggtgtagtaattgacatacatctgcatctgccccaaatcctgatgggtcagctccccggatttaaggtctattaaaacgaaacaacgggccaggtaattgtaaaagaccaggtcgatgtagaaatgcttgtcatcgaaggagatacgcttctgtcgcgcgacgaaggcgaagcctttcccgagttcgagcatcaagcgctgcaagcggctgatgagcagttgctccagatcggtttccagaaaatgctctccctgcgggataccgagaaactccaggatatacgggtcgcggatgatctctttgggttcgacacgtccgggttcggtacgggaaatctcctctttcacagctttcttgtctcggctggccagcaggcggtcatagaaaagcgtgttgatttggcggtcgagctgccggacactccagttttccttgacgcactcgtgcaggtaaaaatcacgggcggcatcgcccgacaccttgagaagcgtgcggcaatgcgaccaactcaatttatcacacagcgtgtgatatttcgggtagcactggtaaaactgcctcatgtaccgcaggttggtggccgtgaacccgtttccgaactccgccacgagccgcctggaaagggtgttgatgacagccttgccatatccggcacggtcggttccctgctgctcgtactccactatatatttccctacctgccagtaagccctcacgagggtcgaattgacatgatgtatcacctttgcgcgcgcttcctgcaagatatggcgcacgttatgcagcagctcttcctcccctttgtcggcaggatgtattttatctgtttctttcattgttcattattatataggcttccaagtgcaaacatactgattttacggcaaatatcgagcggttgcaccgtcttgtcgtgccttattccatgtatctccgcgtttttccatgacgccggactctcgggacagggcctaaccggaatcggcaggacgatcctttttcagcttgcggaaattactgaagttacgctcgatgaaccgcaggacgtccgattcccggtagaaggtcttgtgatagatcatctcgtaaggcagctctcccgaggtgcggtaacgctggagtgtgcgcttgctgatattgagcatacggcacaggtcgtaattgtccagaagacgctccccgtcaggcaggatggaaagcggttgctccacgtcccccgcgcacagcttctcgatacgttccagccgttccgagagccgctgcatccatccgtcgaaatattccttgtccagaaacatggcctactcctttggtcggttcttgcgccgcacggaacgctccttcagcacacggcggatttccgtgagggaataatacagcttccggttgatggccgaataggtgatcacgtgatccgagcggaggcgttgaagggtacgcccgctgatgcccaggtaacggcagacctgctcgccgtccatccattcgtcgtttatatactccttattccatgcacgccccttttcagggagagaggcgattgcagcctctattttctctatacgcccgacaagctcgttataggctcgcgaaccgatcactatgattttcatactcctttgttttttagtctgttacaaaggtcgggcttatatggacagcttaaaacgaggtcggtacgactttttttgataatttacagtgaactgattctcaacggttcatgcggtgaagaaggcagtgttttttaccgaaatccgcggcccgtactcggtatttttattggcagaaatgcgatagaatactgtgattcaacgcttaacggtgttttaatccggacggggctacaacggaacacccgtatcggctccttatacgggtgcaaatacgggtgttcggaaagttcctttcgagagttacggggaaaaaccgacctcggttcttttgttatatacaacgctgattatcagtatttctataaggaatagagtgctttaccggttcatgttctactcggaattgccgtttttcttgtttcgcttccacgtctgcatacgtttaagcagggcctctttcgccttgtcaagccacggtgttgggttgtttcggattttcatatcgcagaatgtcctcgaaaggttcatgtcgaggtgtacgttgaaagcgttggaaatgtagctggcaagttgcgtgagtggcacattgccgaaacagcctttactgtcgagcaggtaaataagttccgtcagatccgtcttcgagtcctgccatgtcggacgcacgtcagacaatggcagaaccatgttccggaggttcgtgctctccagtgattccaattcgcccataagataaaccgacaacatatcgttggccaggattttcgccaccttgaaatccgcgtttgtcgaaaactgcgggtcgagttcatagtagaaggtttccaggtattgctccgtgtcggtctgcccgcgcaggaaatagaggctgtccaggtgtgtagcgccgctgcggaaatagcggataaagtcgaggcgtttctgcgtgtacgcgttgatggcccgaacatgggcgtccaggtactcccgttgtgcctcgatacttcctaccggacggttcatctcgatattgtagagcttgcggtaatagatcagacggcaaaaaagacgaggtttgatttctttgaagaactttatttcctcgtcatcgttttgaaaacggtagccgatgatatattgtttcaaacggtcgaacgcttctcccaggacacgtgacgcttcaagcgactttttcaacacgtcggtatcccgcgattcgatacgttcgatactccgcaggacttcgctgtttaatttttctataaatgcaatcataatccgtcttgttactttcgcgtataaagttagcgaatcgaaaaaccggtggattacgatttttatctttctcttcgtttttttatcacggagccgattttaatgtcaaatccggctttcctgacggatggaagtgggattgctccccatattccgcttgcaaaagtccgtaaagtgggattgggcggagaaaccgcacatgtaggctatttcctgcaacgtgtagtgtgtcgtccgcagcaactccccgatacgttcgatacggcgctgacgcaaccacgaggaggccgagcagccgaaaacccgctggaaacgccggcggaaggtaatcgtgctggaatacccgcaaaccccggcgagttccgtgacgttatccgaggcaagataattcgatttgacacgggagatgaactcgtaatcgtcccccaggtgcaacagctcctcgaactccccgacatcggcgggagtgagatgttcataagaggcgtcgagcattttcagcatgacagcagcgttacattcaacgggcatacccaatgtcttacgggcttcacgcaggtaattcttgaaccgcagccgcagcgtgtcgtgatgcgggtaggaacactgggacagaatggtgcagaccgtccgcagttcatcgacacaacagtagccgaaataccacgttacaagacgctcgacgtaatggacggcatgaaattcctccgaaagcatcagaagaagcaggaacggggtgaaatcctggtattcccccgttatgggacggggtgcttcgtcaagcaaggaggcgatgtcccgcatcagcagagaatctcccgagtacgcttttatttgttcggaactgcgggcataatcccggtaacgcgatatgaccgccgacaaagcattgaacttcacggcgtgaacgccttctataaaggaagggcgaagactgttgtaaatggataagtcggtttgcataagtcatttctataaaacggagccgcatccccttgttgccaaagctccgcaagtcgttacttatgaaccgcttggaacacggtacgaatcctaattacaaatatatcgcatccgacaatccggaacaaatatcagcaggcaaaaatgaaaataaacctcgttatttttgatttttacctgcaataatattatatttgcaaacaaataagagttgtttgacagcatgagaaatatagtgtatcaaagcactttaccaatttcttatccgttgcctattctcatgcgagtttcttttaatctatttgtagtcaattaaataccttcagactacatcaaatatacaaaaaaaatattgtttatatcattttatatcgtaattttgcaaggtaatcaatgaaaagaagaaatgaaaaagattttggtagctgaagatacggaaagtaattatctcttattatctataattttaagaaaggagtatgaagttcaccgtgcccatgatgggcaggaggctattgagaaatttgagagttgccggcccgatatgattttgatggatataaagatgcctgttatggacggtttggaagctaccagaagaattcgtctgaagggagggacacttcccatcatagctcttaccgccaatgcatacgacagtgaccgtgacaaggcttttgaagccggatgtgacgattatatggccaagccgatcatggctcccgctttgcgtgagatgataaaaaagtattttggtgagtaaatattatgccctgcgggacttttcccatgttccgccggcatgtctcttcaaatagaagaaaccttttatcacattgatgttcatgaacaggaaatagtagggaatataaaggaatttgttctttacggacttggcagacaagaggctgccataaactcccccgaggtagaatgcggattgcagcagaagaaaaagaaaataaaccgggaggctttcactacagacaaccagcaggatattcaagggaaagagcagaaacaaggcgaccggggttaccgaccatctcagtacgcgatgggaaacatattgaaaactgaggattccataacgtagcggattcagcagttctttcaaacgatagacagactgcaatcctcctgccgcgatacgtacttttcttttttcctcttctttcatatcggccgatccgctttccaaggcatatgccgtatcacaatatgctatcgtatactgcttcatggcaatacgcagggacaacataaaatcatccagtagggtatcttcaggcatttcctcatataacggggtgcggatggcgaataattctccggcagcacctatggcggaatagagctgataatccatttttttcagccatgattcatatttccagtacaatccttctcctccggaaaccgctccttcggtactgtacatgtccacccgtttttctcctgccacacatcccacctgcggatggttaaaacattttactatctcgcgaacggcctgcggattaataaatgtattggcgtctgtgaatatgaccaaaggtgtggtgacaaatcccatgccccggttcatagcggctgtttttccttttctttcggggacgaacaatagggtgacatcgggatacgcttttaatttttcattggttcggtcattgctgccgtccgttacccatacggtatgcagtttctctttgggataatccagttcttggcagtttttcatctttccgtctactacctgttcctcattataggcggtgatgaacagggtgatttcgggtaggtcggtgttgttgccgttccggcaggtttcttgcttcggttcgtccgtatcgtagaaggaaataaaactttgttttatttttaccaatatccacaacaggattccgtatcccacataggtgtagaatacaatgaacaggagaacgaagaagaggatttcaagagtgttcatgctagtatttctttatatatattcaatatttctctggctgtgttctcccatgagaaccgacggactctttctagtccatatgcagtttgtgactgatagaattctgcattttcttctaaatgaaggagggcggaagcaatttcctccggttcgaacggattgaccagaataccctccggtcctgcgatttcgggcatggcggaagtggttgaggtgatgacgggagttccacaggccatcgcctccagaatggggatgccgaaactttcgcgtaaagacgtgtatataaagacggatgctccactataaacagcgggtagttctgtgtttggaatgtatccgggatgatacagcattttttttatttcttgtaatccttcccggttcagatattcgtctatgatctcttctttcaggtcggcgataagcaaggggaggggctgactggatttttttaaataaatgccgtatgcctgcaatacccttgccgtattcttcttgggatcggtatttcctaaaaagaacaggtaaggatggttctttatgtatcgggcagtgatggcctgtgcgttccgtatgggtatgaaatgttgtgaatagccgttgtatacggcgacaagcagttgtttgtcaatgtgcaggaaatgactgatgcggttgcattcaaaatgagaaacggtaatgattcttttgcatttggtaaggatttggggaacaatgatttttcggtagaaacgtcccagtctttggtacatggactggttcttgccttgttttttttctagaaagataatgtcgtgcagtgtaagcaccagtggaatgtttccatgcacaggggcagtgttgcttgtgcagtgcagcaggtcgggtttgattttttttaaagccaacggtagtcctatctgttcccaaagcggataggatggccaattaacggtcacgatatgcatgttggcggattcttgcaaacaaacatcatctcccgggctgaccagtatgaagtattcgttctgttggtctatcttttgcagttcccggatggtttccagagctacatagtccatgccatgtttctcttttctgaagatgcgctgggcttctattgctattttcatctgtcgttactttatcaagttagaatcttcgtcctcgtaattgtttttgctatagaaaagagccgtgaagcttcttaaaccttttatggctcgttttttgaaactgctgaacagggatccgtcggccgaaatagtgccatagccggtaaggacacgggctttgcgggcggtgacgaatcttaattttccgtattttttcaatgccagtgccagggagccgtcttctccgcggagtatgtctgtccggaatccttctttccgggctgtttccgtgtggaaggcaaaagccattccacgtacattgagctccggtctgttcagattttgtattttcaaatagagatcacgtagtgtctcatagaagaaaagtcctaaatgatgttcattaggaagaaaactccacagggcgtatgcacctgccacttctttgtcctgtaagacctttatcatggtactgatgtactggggcggataaagtgtgtcggcgtctatgcagagatgatacttcccccgggcatggttcagtccgcattgccgggcaaaaccgggacctttccggtattcattgaagtaggtgactcctaattcttttagtacctcttcggtgtggtcggtagaatgattattgatgactagtatttctacaggatagttatgttggttttcacataaagaccacaggcagctcaatatcctcttttcttcattatgggcgatggcgaccaccgaaaccagcggagcatgagttgcaagctgccggaccttgtctttcacttggttgataaccgcttgtggggcttgggtgaaaggcttgtcatagatggataaatagtcagcgtaccacttcatgcgtttttatatattcggacagtgtgaccggattccggtgattactgaatcgtgatttgaatttgtttttgaggatatagaacagggcttgaatcatcttcttcatttccgtcagggcggaacggcggggatatagtttctccaccatttcccagttccatttgttgaggaagaaagaggagtagtattcatcttcgggattgactagtatctccacttcatctttccactcataacggttcaaggttatatctccttccgtcagccacagcagtttgtaggggagggattggaaaggcagataattcaggaataattctccatagtcgttttcatagtttcccggcatcttgttcttttcatagaagaccagtttgttgtctatatccaatataacccatttatgtgattttttgggaaacaagtattcgcccagcagactgggagtttctatgtatccccgtcgggctaccctgcataattccttgacaaaagcttcgggatgttccacgtgttccaatacctgattgcatattacgtagtcaaactccttgtctttgaagggcagtttttctccatcggcatgtacaaaggtctgatgcgggtatattttcacgtcaccgcagcggtggtaattggtgtcaataaatttttcggctatcacgttggagcgatatgtcggattatggcccggacctatctccagcactttgtcgtttttatttatatggatgtctcctctgtcgtagggggaatctgttttcattgttttgttccgtttaataagttgttgaatagctgaatccattgttgcattattacatcttcagcaaaacgttgtacattgatgcgggcttttttccccatttcttttcttatttgttcgttctcaatcagataatttattttttcggccagttcttctgtttttccattttcgaccaatagtccgtcttccccgtcccggatgatgtctttaggtccgcacggacaggcgaatgacacggcaggtactccgcacgccattgcttccgctatgaccattccgaatccctcaaatctggaacttgatacaaagatagaactttcatggtatttacagagcatatccggggttgcattttcaagaaaaaggttctttaatttccattttccggccagtacttgatatgtagtcttgtttcctttgccatatatatgtaattcccagtccggatgccggttacagattttgctccatgcttccagtaacaaatcgaatcctttttgataagtatatcttccggctgcggttatccgtttattgttcaagtcgctgaatgttccggattgaaagggtagagggttgctgataacttttacattttgcagttcgggccagttggctctgtcttcctcactcagtacaacgaacttgtccagcttttttaaatgcctcaccagacttttcatccataatttggcaaaaagttccttgatgaagttgctttcgttcttttcaaagttacgatagtttttccggtttacatgtagctcccctatctttttgcttccatctttgagggaagtgataaagtttatttcccgtcgtaacaaagaaactgtgatgtccggtttgaggtgagacaaggcggcagagagcttgcgtcggtatattctttgttttttcagataaaccggcacttttttccaaagagggagttcccataattcttcaaaatctatatccagttggatgatttttactttaggcgataaagtatagcagggaggcttgccttttccgtcagtcagcaaaatatatatgtcataattaccattctctgccagataattggctttggtggtcagtaccctttccactcctccggggatatggagagagggggtacaataggcgattcggatcataggcgggagtattacaggttgtttattactttcatcatctgttctttccatgacaggtttttaatggaatcccttattttacgaggagacagatccagttccatatagaaccggataagccggtggatatctatgggactttcgtcggccggaactttcagtatataaggcatcttgtcaaagtctccatctgtttctgaatatgcaaaaggtattccccgtgctgcatattctctgttttttaatgttttgattttgtcgatgccgctgcggtggcgtgccagactgccgatggcaaagtctgcttcgttgaataattcgtctagttcctcgttcattttttgtccgtggaagatgacatatttttctatatgatatttgttgataagttcataaaatccgggagcgtgttgtgaatcatgcatttcggatttccatatacctcctgcgatgtggaaaaatacggttgtgtttgccgggttttggtaatatttacccaaaccctctatcaggcggtcgtaaccgtgccaataatgtacttcggccactcctagtagatgaatgacggaggtatttttagaaaccgtctttttcagcggaatggaatcaaagtcaactccattggatatctgaatggtacgttggccgaatatacagtgatagtctgagaaagtgacgatggcgttcacgtgttttgccaatgtctttcggaatactttatccacttgtatccccaggcgtgtgaccagtgggaaaccggcgtattcgctgtcgtaaggataggtaggtatttccatcgctattttaattccggctttcctcagtttgctgaacagccggatggtgaacggatttgcattatggaaagagcgtacatagattaattccacttgatgtgttatagcatagcggtatatgcattggtaggaaactcttcttttcgccgcagccggtttgcctgttccgtagtcttctattatttcattgtttatcatccttacccggtggccgttgtccgctatgctgtatgtgcataaacttacccggtgtccacatgcttcaaagcctttaacctgatgcaagatctttttactgatgccgctgtaaggggatagtccgtggaaaaggaggtagatgatattcatggtcgggcagttgttaaggtgttgaatagttcatcccacagtttcatcacttcttcgcgtgaataacgttggatattcttttgggcctgctttcccatccgtatgcgtttgtccgtatcctctatcagccggcatatcgcgtcagccagttcgtccgtgtttccgttcttcaccagtattccgtcttcttccggagtgataatctcggcaggtccgtacgggcagtcgaatgaaatgcagggaacaccacatgccatcgcttccagaagtgccatcggtaatccttcaaatcgtgaactcatgacgtatatggaactttccagatatttttcttgaatgctttttgtcggagggcatagtgaaaaactgttttctatatgatgcttttcaataagctcttgcaggctgttcctatcctgtccttctccgtaaatgcggatatgccagtcgggatgcttccgattgactttgatccaggcttcaatcaggcggtcataccccttctgttcgctgtatcttcctatgctgatgattcttttctccaggcaagaactccctttttcgggtgagaaaggtaagaagttcggtatgacacaagccttcttcacttctttccaattatccgcatcatgttgtgtcagaacaaccagcgcatccagtttttttacagcctcctcctgtttctttctccaatgccgtgcgatttgcttgtatgggaatccccgttgttccatcagatgcaggttacgagtgtatggtttggctatatgggattctcctatttttacgcttccatcatccagttgtgtcagaaaatccaattctcggcccaatgtgctgatgacaatatccggtttcaaggttttcagccaatactccagcttctttctgtacaggtgcatcagggtaaaataataatatcctcttactaacaggttgtgatgatattgtctgtcaaaatcaattcctatgtcaatgtgcctgattctgggagatatcgggaaaacgggcgggcgttctttttgtgaatctgtgataataaatacatcctgatgcatttcgtcagccagatagttcgctttttggatgatgctccggtctgcgcctcccacggtgcatagtgctgtgtatagataaacgatggtcatttttcagtcagtttatgaaacaacatttcccattgcggcatgatgtttcggagtgagtagcgtgttatattttgtttagctcttttgccaaaagcttttctttctgcttcatgttctatcaagtggcaaagagcgttggcaaatccttgtatatctccgtttttgacgaggagtccgtcttcctggtttctgatgatttccgatggaccgaaaggacagtcgaaagaaacacaaggaacacccagactcatggcttcgatcaagaccagtccaaaaccttcgtaattggagcttagggccagaatggaactgttcaggtattcttgcgttatgttttgtgtaaaaggatgaattgtgatggagtgttccagctttctgtctttaatctgccgggttaagctatccttgtaaaatccttcaccaaatatatccagtatccagtcggggtggcgtttctgcacgatattccatgcgtcaaccagtctgtcgaatcctttttgccaggtcagtctgcctgccgctattacacggggagcctcacaggagctgattgtttgtatatcaatagaggtggtgttcggaatgatatgtatattcggatgttgtccccacatggcggcatctccttgtgtcagtgtgactatagcatcgctgtatcgttttacatcacggaaacattggtagctgacgtatctgtcttttatatctttaaaaaaactctttttgcggtttgcaggtatccgggtgtatattttggcgcaatgcgattctatgattttctttgccttgcagtctaatttacagatcaaatccgctttgaaactggtatttcctgatatgatatcgggattgatgagcctaatctcttttttaaatttttgttcgaatttatggttcaaagtccatcccactctcaattgttccagaagcggatgctggtattgcaaatgaaactttgtatccagatcgatatgttccactttgtgggataacgggaaagaaaaaggatgattgccttgggaagaagtgataagatagacctcgtgcccataaatttcggccaagtaattcatcttatccgttaaaatccgttccatgcctcctatacgggctatggagtcgtatacatatactattttcattcccctggtttgtttttccgtaaaaatagtgtattctttttatatatccaataagaagttgttgaaattcctgtccatatccgtttttttatggaatgtcggctgtattcggagtaaaaagtgggtttcaatggatgaagatggggctatttagtaattaaagtctttggaatgttgtgagtatcatttgtttttgcgaatattgcattttataatgattagcagataatgatgaaagagataacggtggtgatgccggtttacaaggtggaaaaatacgtatcagaatgtcttgattccataatcaaccaaacttttgattgttttgagtgtatcatcattgatgattgctctccggataacagtatgcgcctgatagaggaaaagctggccggatataaagggaacatcagttttaggatcgtgagaaatgagaggaatgaaggagtctctgcggcaaggaacaagggaatagaactatcccggggtggttatcttttttttatagattcggatgatatgctttatgagaattgtctggagaaattatgggaggaaacgaaaagatatccggggattgacttggtgcagggggattcttattcagaagggatggaaaacaaaaacagtgatttgcaaagatatacggaaggacggatacgtatcaacaagctgtttctggattcgaaaataacatccactccggtcaacagattgatcagaaaggaggtgctgacagagaatgccatttatttcaggacgggcattttgtttgaggactttttgtggtgctattttctgtataaaaaggtggaaacgtttgcttccgtcaattcttttacttatttctacaggcgttcaaatcctttctcaaccatgaataaggcgaaaacggactttgacaagccggcaaaggattttatttttatcttgactgtttttaatgagcacatggaacaggaattgtatgctgaaaatatctgtttcattttgaacaagttgatgccggtggtgtataatgctgctgtaataggggttacaagggaaagtaatgatgcgatagataagtttaaaagaaatctgataaggaagcattgcagagagttccggcctatggaggttttgtacgaattgaatttgttctatcctttttctctgcttttgaattgggggatttacagacatcacatattgtataaatacgctaatctgatcaaattgtattataagatatggggaaggttgtaccgttgaatcttcttgtgtaatgaatattattcccttaggttggtagtcttcttgttacattggttgtcggtttcttttgtggccggctcattcatatgtgacaggatagcggaaaaagcataatataattctttgaatgcttgcaggcggaagaaaaacaggtattcaaaaaagtatttggcggggagccattcttttgtttttgccgaagggatacaccacggaagtggtgacaggtaatagtggattttttcttgtcgcaacagtctgttgcatttcatgcttgcgttaaaccgtatgattaaactctcgcggtcttgtttggacatagcaagggactggccggattcggtacaataataaatgattcttctgtctgtggttgctttgggggcatatataccgacaaggcatgaaaaatacacatcgttggctattcttgtttcatcgaattgaatgtggaatgttgacaggaagctgcgccttatcattttgccccaaggaacttgagattggtatcgcagtttgttttccgggtttacatcattgaagaagttggtatagtaagttccgcgtcggctttcttgggacggattgtcggacatgacaaaacgtacattgaaatagatgacttcatgggggctgtccatgtattcgtttaagatagtaaaacaatcggctgtaaagaaatcgtctgcatctgcaaagataatccatttgccacgggcgtgggagagccctatgttccgtgcgtatcctgccccttttccctccttagtgaacaggacttccgtattttttctgccgtttcccggaaaatgagaaaaatcgacagattcggaattgctgttgtcatcaatgataatgatttgaatttcatcccaagtgggaattgagcacagacagcgttccagaagacggggggtattcttgtgcggaataatgatgctgtaatggtaacttgtgttctttgtcattcttcttctttttgcaaagatattgatttatattcagcatcatgcattatcttgataatatctcgatgagtatgagaatctttcactggaaattcggggtgataatgccctcatgccctcattgtgtgcacaactggttgtttatgaactatttgtatagtgatggtaaaaattgtagctctcacttatgctctcatgccctcactgttttttggagcagaatttcatataatctatttgttatcagtaatatatccttttttataagttgttccgatttaatatgaagtaggatgttctcaggctttttctttgcaaaaagtgtgtctgaaggggggatacctctatggaatatggcaaatttccgatggcagtaaaaagatcaggaggtttttaaaaaagctcgccatctttttaaaaaagaacaaggtcttttttttatttgacctgttgtttttgggggagcaggatttcacatatgtacgtgccgctctatacgtatgtacgtgccgcagatacctgctttgtattatatgatattctttcttcattccgcatttattttcatttctttattgtatctttgcgaagaaagagtgtaatctaaattccatgagaatattattttattgtgatactgtcttcagtttcggcggagtacagcgtgtgttggctgaaatagccaaggctttgtccggaaaacatgaagtcacgatactgaccacggatacttgtacggacttgtcgatgtacggatatgccgaaagtaccgtgcggtttgattctttctcttattccgcctcctctttcatcgagcgtttgttatgtaaaggctatagttttttatataaacatgggttgcctcatacccggctgacttcagaatggtatgctgccagttttttcccttcttcttataaacggacattggcaaggaaaataaatgcccggcaatgtgatgtagtcatcggggtacatgcttttatggctctgcacctctctgcagtaaagagtcggatccggacaaagactgttgggtggctgcataattcttatgaagcattctttgagaaagaaactccctatttgccgggattggattgcttttttcaagtccagatggggaaattggacgagagggtggttttaagtcatgcagatgccggttgtttctttcggaaaatgaacctgtgctgcgaggtgatatacaatcctctgactgtactgcctaaaggtcggggaaagaaggaatatagaaggattttggcggtcggtcgtttttcattcggacataaaggatttgatattttaataaaagctttttctgtttttgtgaaaactcatccggactggacactggaaattgtgggggagggtcctgaggaagcgctttaccgttcattgatcaatgaatatgaattggaaaagagcatcgcgctgcatcctttcacgaaagaggtgcaggagtattatgcacattccagtatgtatgtgctgagttcccgttgggagggattcggcctggtgatgatagaggctatggcgcacgggttacctgttattgcatctgatttaccgataacgcgcgagttgttgaaagacaaagatatggccgttctttttgaaacagggaatatagctcagctggccggttgtatgtcgtatatggctgatcggacggattgggaatggatgggaaataaggcggtggagtatgctgatacatttcatatagagaaggtatgtgacagttggaataatttactaaaaaaagtagtgtatggtacaagatgaacaggaaaaatgggatattgtgatcaagcctcggtccggtttgttccggttggatctggaagaggtatggctgtatagggatttgctggtaatgtatatcagacgggatatcgtcactttttataaacagactgttttaggaccgttatggtttgttatccagccactgcttactaccgtcatgttcatgtttgtttttggcggtattgccggtattcctaccgacggacttccccaaccgctgttttatatggcgggcttactttgctggaattatttctcggagtgtttaagccgctgttcggatacgttcaacgccaatcagaatgtatttggaaaagtatatttccctcgtctggtggtacccttgtccatcgttatatcttgcatgataaagatgggcattcagttcggattgttcgttttaatttatatttactatttgtgcaacggatattcgttgatggtcaacggatatgcttggttggctcccttgctgctgctcatgttggcaggacttggtttggggttcggattattgatatcctccttgacgaccaagtaccgtgacttgcgtttcttgattactttcggggtacagttgtggatgtatgccactccggttatttaccctttgtccgtgatgaggcagagtcatgagcagtatatgtggatcattgtggcgaacccgctgacttcccttatcgaaacatttaaattcggattcttgggggtggggactttcagttggttccacttaggctacacgttggtgtttacagtggtgataatgctttgggggatggtgacttttaatagagtgcaacgtagtttcatggatgtgatttaaaagaagggacagaatgggaaaaatagcgatagagtttcagaatatcagcaagcaatatgcattgggaagcatcggaaccggcacgctgagccgtgatttgaatcgttggtgggcgcggatccgtggaaaggaggacccgtatctcagaatcggggaagagaatgaccgttccaagaaagcgacgggagattttgtatgggcgttgaaagatattaatttccatgtggaggaaggtgaagtgctgggtattataggtaagaacggtgcgggaaagtccactttgttgaaaatcctttcgcgggtgacttctcctactgccggttgtatccgtgcacgggggcgtattgcctctttgctggaagtgggtacaggctttcatcccgaaatgacaggacgggagaatatttatatgaatggttccatcatggggatgaccaaggcggagattacccgcaagttggatgagattgtggctttcgccggtgtggagaaatatatcgatactccagtgaaacgttattcttcgggtatgaccgtgcggttgggatttgctatcgccgcccatctggagccggaaattctggtggtggacgaggtgttggcagtgggagatgcggaattccaaaagaaggctattggcaagatgcaggatgtgtcgaaaggagagggacggacagtcttgtttgtcagtcataacatggcagcggtaagaagtttgtgtacaaaaggaatatgcttggaaaatggtaccgcggtttatcaagggacggttcattctgccatcgattattacttgaaagagaaagggacggtccggaaaagtaaaattatagattatgtgggttggacgaaaaatacgcttcatatagattgcattgagataaacggaacggaatgtgcctcttccactattcatggaggtcagaattttctgactgtgaaaatacagggatattctgaagaggatatgatgtatgatgtaatgctggttttgaagagcaggacggaagtgccttatgctacttatgctccgggacattattacgggagtatcagtcatttacctaaaggggatttttgcatcgagaggcgtatagagcttccgcctgtgctgagtaaaggtgtcctgcaggcagatttgtttatacatcatcctatggtggaatattatttgaaagcagttcgttgctgtttgctggaatgtgaggggtttcaaagtggattcgggcatgcactgacacaaacgtccaacggctttatcggattggaggatataaaagtttgatcattatgttctattatggagatggagaaaaaaagaatcgtatatagtttgactggaagagggttgttctcagagttgtctaaccttgctttggcattggtctatgcggactataatcaggaagagctgactgtcaatacaaggaactggaatgcaagggtagagaaaggctggagtgattatttcgaatcggtcttgccagactgtaacggggtgatgtgttcgcaatatattgtttataaaaaggggaaaccttggtggggaaatatctattataatccgtccgcttttttccggtattatattttctatatgatgaataggatatatctgttatttcatccggaaacggaactagggaatgaggtctttctaaaaatgagatcggaggattttctggagaaactggaagatatcagaaatgattatggctctgccttgcggaaaatattaaaatttaatgaaaagacaaccggctatatagaaaaaaggaaaagcgagatgaatttgccggtagattacatagcggtacatataaggcggggagataagatagtttcccgtgagatgaaggaacttggtttgtctctttatattgatgctgttaaagggaagaagcatatcagccgtaatgtgtttatagctacggatgatggttctgtgacggataagttgaaatccgtactggttgccgaaggatttaatgtttactggaacacagctgtgacacaaacaggatttgacgagtctttgtttaatacaaaggataaaaaaagtagatatatagatacgttgaatatgctgttggatatggatattctgatccattcttcattttttatcggtacttatacttcgaatgtcagccggattgtgcctctgtatgtcggattcgaaaaatcgctcagtctggatgacgaatggaaactttagattgtaaaaagcggaaaattatgtcacaaagaaaattttcgattataaccattaattataataataaagaagggttgaggaaaaccatagaaagtgtggtcggccagtcttttagggattttgagtatattattattgacggagggtctacggatggaagtattgaagtgataaaagagtatgccggtaaagtggactattgggtatcggagccggacaagggtatttatcatgccatgaataaaggagttttacaggcgcatggagagtatttgaactttatgaattccggtgatgaattttataacaatggtgtgttgcaggaggtggcaccttcattggacagcgatattgttgttggaaaaatagtgcatggcacagaggtgtggggatttcataaggaggatataacgctgatggatttgattcggggaactgtattgcatcaggcttcattcttccgtaaagaactttttgatgaaaacaggtatgacgagagttataagattgtatccgattggaaattttatattcagaccttgatattcaacaatgcgacgttccgcaatattcgttccatcgtttgtaggtttgtacccggaggggtcagtgaaacggatgccggaacaagagatatggaaagaaagcgggtgtataaggagttgtttccggatagaatgatgaaggattatataagactggaaaaggtggaatctcctttattggaactgattcccgaactgaataaaactgcgggccttcatcagatggcatacaaattggtctgtgccttgttgtgggtgcatggaaagataaaacgggtgcgtgttaagtaagcagtaaattggtcttttcacttgagccatgcccgcaggataagtctgatgccatatagcgcatactttatttttagagaaagtggaagatgtatataattgttttttctgattcttagcattctgtcccataattcattgaaggggatttcccgtgagtgttgggtatagaacaagaacgaactttttatgtaatcggccgacaaagcacgtagaatataggtggggaatgtggccgaaagtgaagtcatcaggtcgaatgcatccatgaaagtgcacagtttgggggtgtagtttttttgcgacaggttcatggcgcttgattttcttgtgacatagtgataatagggggaagtggtgtatgcggctgattggcagtggctcaggtattgaaaaataaagagcctgtcttcattataataaatatgttcattgaattttaggtgatgtttgtcaatgatttctttatgatataatttatcccataagtttcctttgtatttgtaatgcctgtcgttaaacagggagtgaatggcttcccactgggttaatttgccggatttcacttcgttgatgtggtaaatcggacgaccatcttcattttcaatgatatatccgcaagtagccagaccggcttcgtttgtccggataagttgataaagagtggctatcatatccgtttctatccagtcgtcgctatccatgaaagctatatattctccttttgcggtttccagtccttggtttcgtgcatggctgactccttggttcagagtgtgtattacctgtattcgttggtccttgcaggcgtattcgtcacatattttcccgcttccgtccgtacttccgtcattaaccagcagtacttcaatgtctgtcagtgtctggtttaagacgctgttgatacacaaaggcaggaatttttctgtattgtatatagggatgatgacagaaaccaacggcataacttataattctgtgagtttataaataagatcattctttagtcggcgaagcgtataaagcaggttgctcggattctgaaacgtttcttccaagggcatgatgacgggaacatactttatctttaaccggtgccttatgcaatagacattgatcaatctttctgataaatagccgaacagacgtgcctgatccggataggcggacagttttacccgtttttctaattcaaacaatacgctgaatagccactgggagtattcgtcaaaatgtttccgtccggtgatgaacatattatatccggaataggcattgcagtgatacatgaatgtatgaaaagcttcagcatattcgggtgtgaggtgttgaatgacttctttcagcaaattgaggtcattgactagatggaatatggcgtattgtgtagcgacgttatagggataatgacgcttgggagagaggatgatgtcataatcatttaataaggtttctaaatcaggaaatcggtaagtttcttttagaaatgaatctatgttgatgaaactcctgtctggtgaaaaagccggaaacgggcgatgaaaatcaaagaagcgcctgtaatgattgagccctataatgtcacactttagatttttccaagcccaataatgggcggttagttcacaaaagtgaggattcctgtcggatatattatctcctgtgttatctagtacagggaagaatcgggcactggttagggaggcccccacctgtatgggacagaagtactcatgctgtggtagccggctgtccttatgggcacatactaatatttttatattttttcccatgtttgtgattgagggttatagcgtttgataatgcgtgcgggatttcctaccgtgacacaatagtcgggtatgttttgggtaaccacacacccggcaccgataaaacaatgtttgccgatggtgattccgggcagtacaatcacgttggctcctatgatggtatgttctccgatgtggataggagaagtggtgataccttgttcgatgatgccttgagtgatatcctggtaattgtgatctaatcctatcaggactacgttttgtgaaatattgaccccgttgtctatccggatgggaccgatgaccgtattgccgagtcctatccggcaataatcgccgattacgatgtcgcctacggcattgttcaagcaggagaaatcttccactaccgaatattttcccatctggaacaggtggaacggtggaaggtctttccgtacactggaataaatgactgagccccggcctttttttatgtagaaaggctgccatacgcgtatccaccaataggggcgtgtctttaccggatgcatgatgaaaccgtgtatccgttttttccattgcgggtgttgctgtaagtactcttttatattcataattctatccatgctgtgtatggttgaacttctgtgccattcctttcaagtgaaacaagttgagaagcataatgattacaaaataaggtgtctgcctgaggattctgctcatgtatttatatctcatattggacggaatggccaggtataacgcaccgttcagcaagataagcaaaatccaccactttatggaagaagccggagagaaaatgcagagaacacatgaaaagaatccgatgagcgccaacagaatgctgcggggggcgataaaggcttggagggttttcagcagataatctccgtttccgttcagtaaggctgtggggaggttacgtcccatttttaatgcaaggaaaagctgggtggctatccagcggcggcgctggttacgcaaggcatccggttgccggactttttcgtccaatgtttctagggtgtctatatattcaatgtgaatgccttgacggagcaggagttcttccagttctttgtcttcgcccgtactatgggtatggatgatgttccggacaaaccatcggaaatcgaaagccattccggagccggtaagggcagatgaaaatcccagccggatgtgtcccttgcggaagatggaattgttcatctcttcgatggcggcatccaatagggctatgtctgtattcatatttttggctttgcggtgtgtctgtatggcttttataccctgtgaaactgccttattcagttcttgaagataacagggtgagatcagattatcggcatccagtatgaggacataatcgtatggctggtctgtgatggtctctgctgcaatgcgcagggcttttgccttggaactttccttttcatgcagttctatcaagccgatgcgttctttgcgcagtgaggcattggtttcgggacgcatgtggtcggatatgactatcaggtcgtaaagctctgccggataagtttggcgcagaacggaagtgacgcaggcgtgaatgaccgcatcctctttataggcgggaacaaggatgataaaacgttgccggacagtagtcgcgggatatttcttttgtttgaagaaatgagaggcggcagaaaacaggactatataccccacactgacggaaaggtagatatatagcgtatattccatgatatgtataatttccgatagcatggggcttttattttttctttcttaaaagcatattgaatatcatgcctgccgccagaaaggggatagctttcatggctttgttgaatttgctgtccaccaagtagtttggagtggctattgccatagtcaataagaaagtgagtaataatccccaccattttaggcaggcgctccagtggaagtatacggacaggaaactgaacaggaggaggatacctagcaggatggtgcgagggaaaatgaaccattgcagaatacggtcggcataatcaaattttccacttaaaatggcgccgggcagattaccgatattggtgaacagggaataatattgggttttaatccaagtgctatgttgggtatagaattttttctttccactattcttcaaggcatatacatgggtattatttaaatattccacatatatccgttcgcggagcagcaaggattcgatgactttttcatcgtcatcgtcttttaaatgacggatgttttctttgaaccaagtgaagtctattgcggttccggagccgttcagcgaagctgaaagtcccaaattgacatgccccgcacgaagaatggaattgtttatctcgtcggtgatggcattcaatatgctgacattgctgggtctttcctgatagatgcgatgggtttggatggcattggagccgctggcatacgtattgttgacaacttcaagaaagttggtgtccactacattgtccgcattcatgattaaaacgatatcgtattgtccttcttgtaattgtgacattgcagctttgacagatttcatttttgaacttttcttgaatctggcttgcaacagggtgatgggatattgtgccagttgtctgtttgtttccggcttcaggtggtctgaaatgacgataatgtcatagcagtctataggatattcttgttgcagaaatgatttgacggtatagggtatgtagtcatcgtcctgataggccggtatcagaatggcgaaacggtgttttactcttgattcggaatatttgtcggtgcggttgcctgttgccgctatggcgtacaccagcaggtaaaaaacagtaaaggcacatatcgcgaaaagtagtagttctatgtatgctagaaatatcatggctgtttgtctttgtttctaagtttgaaaaatgcttttgttccctcccaatgtgctttggctatggctttctttccttttcccaaggcggtcagtatgtttttgggacatacaatcattgtctggtataagatggaaaccggaagtttccagtcaaagagattgcggtaggcatataataatctgtttctgctcaggtaatagtatttcaacggactttcttttccggtggagctgctgtccttgtgccatatttcgcaagcgggatcgtaccatagttcgtagccttccctattgatataggtgcaccagtccagttcctcataatatagaaaatattcttcgggcatcaggctaagcttgtctattattgtttttttcagtaacatggcggcaccatgcagataaggcgttttttgggcggggtagtggtctttatttattttccctttgcctatggctctgtttcttaaggtaatgggcgaaagttgggtgtatcctgcaaattgtatggcgtgcggttctgcataatcacggattaacggggagacacctgctatcttgtcggaggacagaaggcgttttatcaacaagggtatggcatctttgaccatacaaacatcattgttcagcaagaacaggtattttccttttgcaaggtttatacccagattgttacctccggcgaatcctaagttccgctcactgcgtacggcttggataaaaggatatgttttttgtagcaaggcggcttcattggcagtggaaccattgtcaatgactatcatttcataactgacagagaatacagtggctgcccacgagtcaatgaattcgcaggtgtcgtgaaaaccgttatagttcacggtgatgacggataggtcaggctgtcggtagtccatgtatttctgagtattgtttatctaaataaggtcctaaaaaaacaaaggtgaaacaagaataaatcaagattccgttaggaaactggaaataaaccatattggcgtaagaagctaccagtatgcctgcacaaccgcataacatacctgtcagcggtccccggatttccggatttcggattttgaataaaaggatgtaggagcccgatagaaatagaatggcatgcatacccaaaaacacacacagtcccactattcccatctgtttccatacatctaccaggctggagtctgaaggacagatggaaacgaaataatatttgttatggggaggaactaccccgtctatggctcccatgcctatgccgaagggcatttcatccatgtaggcattcagtgctttctggttctcgaaacgagccatcatcgattgatcctctgtgtcaaagacagtacgcatacgacggatcaacttattgttctctccgatcttggtatatttcagcattcctatccctccggcaagcaggataaaggagatgatgcctattttccaacttttagacaggaacagaaagagccccagccctgcaatgggtacagctatggccgatcgggttcccgatattaacagaccataaaatcctgccatacccactattaaatagaagagtctgagaaataggttctttgtatagaaaaaagtaagcgtgaaaacagtgcaggataatcccatactggcaccgaaaagacccgcgtcagtgaaaaatgagaaatagcggatgccggaatggataaaatgggtacgtgctccgtaggcccacaaccagcttagctcggtactgtcaaaacctttgttcttttgccaatatccttttgcggcagccagtagggtcatgataccccatagtattaaaaaataatggataaaagtgtagcgattgcagtgtatggatagaataatacaggtcagaatagggtataaggcccagggtcttaaaatacgaagccatgcttccatgtaaaattcaccggttataccattacctatgttgatgatacaatatagcagccagaccaatgtgatgcaggtatagacgtttagtattttcctgaaatgatgattgctttgcaactgtttcagaagaataagggccaacatgatgccgtagagcaaatcaaagatattggtaatggcaatagggatggaatgatatctgttaattcccattatcaggtaattcagcataaaggtgatggccagcagaatgacgggtctgtttatgcatatgaagataaaaagcgtggcaaaaggtatgaaccctattgcaactcctatggagggcttcatgttgagggctgtccataggcataagcacagtccgataatgaagctggccagaatttgacctgtatgggttatatttatttcttttgctatcattatctattttcctttgtattcaatggcggtcagtccgagttggaacagcctgtattccatattcttaaagttcgtgtaaggaggtaattgtcctgtaaagtcttccactgtatttctgtctgcttgtgtcagatagaaaaggaggggtacttctttttgtttaacttgtaacaaatgctcatacagtgcctgatccgtatttttccaagtacggttggcacggacaaccagcagattgatggatgcttcatttaacaaagccggaggcagaggattgcttttcaggaccgggtgctcgattagaagtatttcatccttttccagatcgggacatagttctttcaaattgtttgcctgtacatattggctgtcttcgcttagaaaatcttcatcgtatgtaatgcggcggacgtttagaccgatgctgctccagtattcctctatcaggcgggcgacatgggtctttccgtctttctcttctgtacttaacagattgatgacccgctgttcctgtgtatttagatgaggcaataaagcggtgctgagttgcttgacggccatttcgtttatggctttattataacgtctgtatcttaacttgctttctttaggatatgcgccgataactgttcctccggtgattcgttctgtacgtattttgtctctgagggtacggtccagtatttcgataatcagaaaatagccaatgatgaaaagtaaagtccccagtatggatgcaagtataatcatgcgtgcattggtgggggaggaggtcagtggaaacaggggcggattcatgatttttaatgaagccgaggtcatttccaggttcttttgtcgcaagatggctgcattcaaggctcccatggtagacatatagttgctttccacaaagccgatatgcctttctttccggcccagggtagcgccgatgggggagaaataaaggaaatctttatttaaattctctctcattatatctcgtgcttccatttgggctttagtcttttcggcaagaactacttggtcaagccattggctgatgagtgtctcataagatacattgtttgtacttgcggcttcggcacttagtttcagggcaagattgttgatgttttgttcggcgttacttaacatgtttttttgttcttccagctttttccggttcttttcgtccggagtgatttccatggttgagatctgggggttcaattgggacatttgatgaagtttgtccataaactcattgttggtacggatcaatttggctacatcacctaatttatattcatagaaatcgatcaacgccttactggtggaataattgacaagcaaatcattgtccatcatccggtaagtagcgtccatgcttgccacctgtttggtttgttctccgtagttgatgatgcggttttctatattgtactcgattaaagaatcctcggcggcagtcagcattttgcccaatctggccagttcttcttgaaagaacttgatcacattgtttgtttctccatagcgtagttcatggtattgtttgacaaactcttcattcagaatctcaagtgtgttataagctattcccggatcgttggcactataagcaatctcgatcatatcactgtttcccaacctggctacttttatatgttgtgagagtagaggtacgctgaaataagggtgggtataattgagtagttggtagatgaaattattgacggacgggcgttcaaaagctaccagattatgataggtcttctcttcgttttgcttgtctatcaatgcctgtaactctcgtggaataccggaaaccagctgctggtagtgtatggctgaaatataactggtgtttctttcggcatctccatagaccagacagcgggcaagcagtttcagagatactatttttagtgtgcgttccgttgtaatgatattcattaaattactcatgtgcacggtggcgttccgggtatcggtggcatctacgttgtatccggagatgattcctgtaaagatggtggttttcacatcatacgttttttccagatttctggtaagaaaccatgctatgataccggctatacatggaaatataaccatccaccaacggatacggtagataaacttgactatgtatttaaataattccatgcttcttattcctttttgtcttttttcttactttgcctcttgttttcttcctgttcctgtatcgttgtttcttgaacgtccttttctccttgtatggtcaggatgggggtgtgggagattatttcgagggtcagcagctggtcgttaatagtagagcgtagtaaggcaaagtcttgattagcggcaaattcctgttctttagtcttggccacatcatgaatagaggtacgtctgtttctatattcctgttctgcaacagccgatgcacctttatataaagctatattttcagctgatctttgcaatgtttctatattggataaaatctggacatataaatgagctatttgtattttaagggtttcgtatgcttcctgttttcttaactcggcaatatccacctggattcgctggcgcttgattcctccccggaggtcgaacagcttttcaaaaggaatactgatgccgcctcccacattccacgaagtctgttctgtacctacatacctgtaaataagtggggtgttgacatccgtattgctggccacattgtctgctataccgtaagaagcacttccgccggcatggataaaccccagccagttccttttctctttcgatagtaactttttctgtaactgtttctccttctctaaaatctgtaagcttggggtgctgcgtgcattctcataaaggacacttaacggaggcagctttatctttgcataatccacattcatattccccaatatatcatcctgtgtcacaagaggttgttgtaccggttgtgtttgctgctcttcctgttgtgcgcttaaatggtggatagaacaatacatacagatgacaaaaagacatactttacccatataataaatcccctttttattcctaaaacaaattatttaaacatctcctttttggacaaaagctgtcaaagtcttgaacaggattttcatatccaggaaaaaggagaattctctaccgtatttcaaatctaattctttgcgttctttagcggataattttccggcatccccccgtttttccacctgccacaagccggtcagcccggcaggcgccatgaagcgttcgatactttcatcgtttgtcaggcgttcggcttcatagagtggaagaggacggttccccaccacagacatgtcgcctttcaagatgttgaccagttgaggtaactcatccaggctgtattttcgtaaaacgcgtcctaccttggtaacccgcgggtctttttctatttttatgaaaggactttcatccagtgcgttttgtctggaaataaactcttcttccggaatgatgaagtcatcggaaaccagcattccgccgttatctataacaccgtcatctccaaacatcagtcctcctaattcttccatcgagaaatctttggcaatctccggagtgccttccggctggtactggttctgaccggcaaggtctttcagctttttatcggcgtccgtatacatggaacggaatttcaggaaattaaaaatggtataattcgttcctacccgtttggatttgtaaataacaggtcctttgctttccatacgtatggctatggcaatcagcagaaagactggggacaggaagattaacgctgcaccggagaaaagaatatcgaagcagcgcttccattggggaaggataaaatgcctcacgtcttttttcttccggttatgtgcatatagcagttcctgccgtttattgatgatgtctattttctgccttaaccgggcggtggtgatgttcaaactgacggtatcgtttattccgctgttcagatagactttgctggcttcgggagtcagcctgtccgtaatgagtacgacatatgcctaatagaactttttcctgaaagcaccgatctgttcaatatctccgttcatctccccttgttcgtgaaggacaatgatgttctcacgtactttcagtctgatacaaattgtaatggcatcctggtagttttgggcataaatcatctggacattttcgagcttgctgaatttgcgcaaaaaatccttgttctttcctatataaagcagaaaggtcatgctgatttactcaatgattttcttaattcttacttttaactccatgggattgaaaggtttgacaatatagtcttccgcgccttcttgtaacaggcggatgcgttctgtggtactgtcttcgctgcttagcataaccaccggaatgtgtttgaataactgattggattttatccattccagaaactcgtctccacgcatttcgggcatacggatatctgatataatcaaatctggtatgttaccttcctgaagccattttaccccttcgatgccattcggtaaccaaatacaatcataatcactggccagatagattgaaaggacttttgcaattgctattttgtcgtccaagaccaaaattttctttctcatagagtaatctttagattttaatgggcaaaagtaaagaaaattattgtgaataaacaactttattctattaattttttggcgtaaagattgcttttccttaaccaagtgtctgaaataggggattgaatggaataaaagccctttggaaaaagggaaaaaagaagacgggacaactcctgtacattatatattgtagtgtatatgataagattaagatgtgatattgtatgatggatgatatttattatattgaaaaatagtgttttggaacataataaaaataaatatattgttttgtgtaattcgaaaaatagtatttatctttgctgccggaaatgataaaagccatattactatgtcggaaataaaccagacgattaatttacatgtatctgtggactgtgtgctgattgggtttgatggagagcagttccgtgtcctgttggtaaggcaggtggggaaacagtccgaggacggatataataacatgaagttgccgggcagccttatctatgacgatgaggatctggatgaggcggccaagcgggtgttgaatgagttgacgggcctgaagaatgtgaagcttacccagtttaaggcgtatggatcgaaagaccgtacccgtaaccctaaggatgtgctgtggctggaacgttttcatcgtttggacgagaagaaaatagaccgcattgtgactatcgcttacctgacactggtgaagattgacagacggttcgaacagctgtctgataaatacgatgcttgctggacacctgtgacggaggtgaaaagcctggcgttcgaccatttccagattttgcaggatgcattggtgcatatacgccattatgtggaatatgttccttccgcaatgttcgacttgcttccccggaagtttacggcggcccagttgcggactgtctatcagttgatttatgataaggtgtttgacgtaaggaacttccataagaagatagcgttgatgccatatgtagtacctttggaagaaaaacaggtaggtgtatgccacagggcggcacgcttctataagttcgaccgttcaatatataataagtcgggaacgaagtgataacagacagataactttagccttgttgtgattgctgtgagaatactccgcctggtcgtttcggggaatcggtatatgttttgggattcttcaccggcctttccttggaaggataatgctgataagcatcgggacagagactattattttaaaattcttaattttcaattaaatgtacctattaggttatgatattggcagttcgtcggtaaaggcgagtttggtaaatgcagagaccggaaagtgtgtttcttctgcattcttccctaaaacagaggctgctattatggctgcccgccccggatgggctgagcaggatccgcaaaattggtgggaaaatctgaaattgtcaactcaggctgtcatggccgggagtgggatcggtccggatggaattgccgctatcggtatctcttatcagatgcacggactggtttgtgtggataaagggcaaaatgtattacgtccggctattatatggtgtgactcacgggcggttccatacgggcagaaagcgtttgaggcattgggggaaacgcaatgtctttctcatctgctgaactctccggggaattttaccgcttccaaactggcatggattaaagagaatgagcctgctgtgtacgaacgtatttataaaataatgctgccaggcgattatatcgctatgaaactgacgggggatatttgtaccacggtgtccggtttgtccgaagggatgttctgggattttcaggcaaatgatgtcgcgggcttcctgatggattattatggattcgaccgttcgctgatagctgatatcaaaccgacttttggcgagcagggacgtgtaaatgcatgggctgccaaagaattgggcctgagagagggaattcctgtaacctatcgcgccggagaccagcctaataatgctttgtcgctcaatgtgttcaatccgggagagattgcttctacggcaggaacatcgggagtggtatatggcgtgaacggtgaggtgaattatgatccgaaatcccgggtgaatacttttgcccatgtaaatcatactgccgagcagacccgtctgggagtgttgttgtgcatcaatggtaccggtatattgaattcgtgggtgaaacgtaatgtggctcccgaaggtatttcttacagtgatatgaacaggctggcggcacaggctcctgtcggcagtgccggagtaagtattcttccttttggcaacggggcggagcgtatgctggaaaataaagagacaggatgctctatatgtggagttaattttaacctgcatggaaagcagcatattgttcgtgccgcacaggaagggatcgtgttctcgtttaaatacggcattgatatcatggagcagatgggtatccctgtacagaagattcatgccggacatgccaatatgtttctcagtcctatcttccgcgaaacgttggcgggagtgacaggggctgtaatcgaactgtatgacacggatggatcggtgggcgccgccaagggggccggcataggcgcgggtgtttataaagataacaacgaggcatttgccacattggaaaaactggaggtgatagagcctgatgtggcacagcgcactgcttacgatgatgcgtatgcccgctggaaatccaatctggagagagcgatggctgccttttaaggaccttcggataaagaaatggctatccgcctgcgtgttgaaaaaaaatagtagataaattagaacaagttattaaaataagtaaagaattatggctacaaaagagtattttcccggtataggaaagattaaatttgaaggtaaggaaagtaagaacccgatggcgttccgttattatgatgctgaaaaggtaattaacggcaagaagatgaaagactggttgaagtttgctatggcatggtggcatacgttgtgtgccgagggcggtgaccagtttggcggcggaacaaagaaattcccttggaacggtgatgccgataaggtgcaggctgccaagaataagatggatgccggctttgaattcatgcagaaaatgggaatcgaatattattgtttccatgatgtggacttgtgtgaggaagccgatacaatcgaggaatatgaagcgaatctgaaagagatagttgcttatgccaaacagaaacaggctgaaaccggaatcaaattgttatggggtacggcaaatgtttttggtcatgcacgctatatgaacggggctgctacaaaccccgaatttgatgtggttgcccgcgctgctgtccagataaagaacgctattgacgctaccatcgaactgggtggctccaattacgtgttctggggtggacgtgaagggtatatgtctttattgaatacagatcagaagcgtgagaaagaacatctggctcagatgttgaccattgcccgcgattatgcccggagcaaagggtttacaggtactttcctgattgaacccaaaccgatggagccgactaagcatcaatatgatgtggataccgaaactgtggtagggttcttgaaaactcacggactggacaaggatttcaaggtgaacattgaagtgaatcatgctacgttggctggtcatacatttgaacatgaactggctgttgcggtagataacggaatgttgggatctattgacgctaaccgtggcgattatcagaacggatgggatacagaccagttccctatcgacaattacgaactgacccaggccatgatgcagattatccgcaacggcggtttgggtaatggcggtaccaactttgatgccaagacacgtcgtaactctactgatctggaagatatctttatcgcccatattgcaggtatggacgctatggcgcgtgcattggaaagtgctgctgctttgcttaatgaatctccttactgcaagatgttgtcagaccgttatgcttcattcgacagtggcaaaggcaaagaatttgaagaaggcaagctgacactggaagacgtagtggcttatgctaagcagaatggtgagcccaagcaagtaagcggtaagcaggaattgtacgaagccatcgtaaatatgtattgctgatccggccggaatggtattgcacaagttttacccttgcagaccttttttaagaaggagggctgtgcaatgaagtctgaatgaattctgctaacggattattaaagaataaacggctgtacaccgtcaggtggcagccgtttttatatttgttagagggatatttatgaaataatactcgcctatatcgaaaataatatctacctttgcggctgctaaattactaagtttattgaatttatatgataaaaaaactattatccgtactggtcttagtttttgccctctcgggttctgtgcttgcacagcaatctatgagtgaccaacaggtgttggaatatgtgaagacgggcatgcaacaaggaaaagaccaacgtcagattgctacagagttagcccgtagaggagtgacacaagaacaggctaagcgtgtaaagaaactttatgaacagcaaaatgggtctgctgataaagacgcaaatgcaacgatgcaaaatcggaaccgtttgcgtgaaaagacaaagacgcaggaagatatctatgtaacagagaattttactttcgaccaacgtccggctgcgggcagagtggtagggaagaacttgtcggacagtgtttctgccaatcgctattacgaggggatgggcatgggcgatatggaagaaatgcagaaagataaggtgtacggacgggacatttttgaaaccagaaaccttacattcgagccgagtgtgaatctggctactcctcctaattaccgtctggggccgggtgatgaggtaatcattgacatctggggtacaaaccaggccaccatccgcgataatgtatctccggacggatctatcacgatccccgatttgggattgatttatctgaacggcatgactattgccgaagccaaccaatatttgcgtaaagaactgaataagatttatgcagggcttgataatgaacagaacccgtcctcacaaatcaaggttactttgggaaacagccggacgatccaggtgaacgtgatgggggaagtgttccaaccgggaacttatgcattgtcttctttctctaccgtgtttcatgcactgtaccgtgccggtggcgtgagcgatatcggtagcttgcgcaatatacaagtagtgcgcggaggacagaaaatcgctaccgtagatgtgtacgattttattatgaaaggtaaaatcaatgatgatatccgcttgcaggaaggcgatgtgatcatcgttcctccatacgaggcgttggttagcatagagggtaatgtgaaacgccccatgaaatacgagatgaaaaacaacgaaagtgttgccacgttgttgaagtatgccggtggattttcgggggatgcctatacccgttctctccgcatgattcgtcaaaacggaaaggagtatcagatttatacgattgatgatattgattattccgtattccaggtaaaagatggtgatgcgctgactgctgaagctattctggaccgttttgagaacaagcttgaaatcaagggggctgtctatcgtccgggcatttatcagttcggaggaaccttgaatacagtccgccaactggtggaaaaggctgaaggccttatgggtgatgcctttacaggacgtgcggtgttgcatcgcgagcgcgagaatctgaagaaagaggttattcaagtagatataaaaggcatcatggacggtactgcacccgatgtacctttgcagcgtaatgatgtgctttatattcccagtattcatgacttggaggatgtgggaagcgtcatggtgtatggtgaggttgcccgtccgggtgagttcgcttttgccgacaatacgactttggaggatattataatccaggctggcggattgatggagtcggcttctaccgtccgtgtggatgtttcccgccgtatcaaggatagcaaaggtacggaagcggtttccaccataggacaaatgtactcgttttctctgaaagacggttttgtgatagacggagaaccgggttttgtgttgcagccatacgatcaggtatatgtgcgtaagagccctgcttatcaggaacaggtgaatgtgcaggtgaccggtgaggttttgtatgaaggtgattatgcgctgacagagaagagcgaacgtctttccgatttgatcaagaaggcaggtggagtgactccgtttgcttatatcaaaggggcccgtttaagccgtcgtatcaatgccgatgaacgcaaacgtatggaaatggttctggatatggccaagactggaaaggactccattgatgtcaaccggctggatttgggagatatctattatgtgggtatcgatttggaaaaagcgatgcttaaacccggctccagtgcggatatcgtattgcgtgagggggatgtgattgaaattcccgaatacaacaacacggtacgtatcagcggggctgtgatgtatcccaataccgtttcatttgaagatggcaagacgttgaaatattatatagagcaggccggaggttatggtttccgtgcgaagaagagcaaggcgtatattgtatatatgaacggtcaggtgaagagagcgaagaagggtagccgtgagctgatccagccgggctgtgaggtgattgttccggtgaaggaaaagagcaactggtctttgcagaacaccttgtccatagcaaccaccagtgcgtcgttggctactatgattgcatctattgctaatatcttaaaatagaaacagtatggcggaagataagaattatacgaataatacggaaagaccacgggaagacgaggagttggaaattgatttgatggagtatgtccgtaagttgtgggctgcccgaaagatgctgctgaaggttgccggaataggtgctattgtaggggtgattatcgctttgagtattcccaagcaatatacggtggaagtgacattgtctcccgaatccggtaaaagcggaggggggagcctgtcgggaatggctgccatgctggggatcggaggcatgagtctgggcagtgaggcggatgcgttgaacgtatctcttttcccggatatagtagcgtctactcctttcattctggaactgtttaatgcacatgtcaccacgttggacggtgaggtggatactacttttgtagcttatctcgatgagcagaaagctccgtggtggggtgctgttatgggattgcccggggcggctataggcggggtgaaatctctcttctccgataaggaagaggaagaagggaacaggctggatcctttccacctgacagaagatcaggcgaagaaagtggaagccatgcgtaaggcgattactgctgatgtggataagaaaaccggcatcaccacagtgacggtgactttgcaggacccgatggttacggccgccattacagacacggtagtggtgaagcttcaggagtatatcacagcgtacagggtctccaaagcccagcaggattgtgcttatctggaacaattgtataaggaacgccagcaggagtattatgtagcccagcagaattatgccaattacatggatgccaacaagggggttgtccttcaaagtgctttgacggagagagaacggttgcagaatgatatgaatctggcatatcaggtgtatagccaggtggctacccaattgcaggtggcacgggccaaagtacaggaggccaaacctgtatttgccgttgtggaacctgccagtgtgccgttgctgccttcgggaaccagcaagaaggtgattcttgtcggatttattttcctggcagtggcgggcgcttccgcatggatcttgttcggacgtgaattctttgaaaatctgaaggcaggacttaatgctcctcaggaggggatggagaagaagtgatataaagatattgacctataaaaacagggtgcatctctttcgtaggaggtgcaccctgtttttataggtcaatcttcggaaatgttgtcctgaacgttacgatagtccggtgtgcagttttcggcttctttaatttcactggcgaaaaccggacaaacgcagaatcaaaactgcctttaatataaactttgattaaagtcgaaatccgtttgatagtctttcaatctcggatgtttcttgtccttgtcggacaaaataaccttgtcggccggaagtcgccagtctatgcctagatcggggtcgtcccatgcgattcctccttcgctttgcggagcataataatggtcacacttgtattggaacaacacctcgtcacttagtaccgcaaagccgtgtgcgaatccgcgggggataaaaaactgccggtgattctctccggtcaattctacggccacatgctttccgaaagtgggagaacctttccggatatctacagccacatccagtaccgctcccttgatcacacgcaccagtttgctttgtgtgaaaggaggtttctggaaatgcaggccgcgtaatacaccataagtggagaaactctcattatcctgtacaaatgtagtcctgcatactttttcttcaaattcacgtcccgagaagctttcaaagaaataccctcttgcatcattaaaaatacggggttccaaaatgaaaaccccgtctattgctgtttttataacttccattattctaatcccagttcttttataactttcagtaaatattgtccgtattggtttttaagcatcggctgggccagttcctgcatcttttccggggtaatccagccttttctcaaagctatgccctcaaggcacgccactttcagcccctggcgcttttcaatgacttcgatgtaggtacttgcctcggccagcgagtcgtgagtaccggtatccagccatgcgaaacctctgcccaatgtctgtactttcaattccttgtcctgaagaaattgctggtttacggtggtgatttccagttctccccgtgccgaaggcttgatattcttggctacttccaccaccttgttgggatagaaatagagtcccaccacggcatagttggacttaggttgggcaggtttttcttcaatagagagacaattgccatccttgtcaaattccgctacgccatatctttcggggtcactgacccaatagccgaataccgttgctttcttgtcctcttcggcagcacgtacggattctctcaacatggcggacaggccgttgccgtggaatatgttatcacccagtacaaggcagacggaatcatttccgatgaatttctcgccgatgatgaaagcctgagccagtccgtcgggcgaaggctgttccgcatattcaaagcgtactccgaaatcgcttccgtctcctaacagtcttttgaagctcggtaagtcgtatggggtggagataatgagtatttcccgtatgccggccagcataagtaccgatataggataataaatcatgggtttgtcgaagacagggagcaactgtttggatactcctttggtaataggatagaggcgcgtgcctgaacctccggctagtacaatacctttcatatctttttattttttatatgtccctacgatttggattaataggcgtttttctcgccccggaacatgttggttactgtttttatcatgatgcggatgtcgagcaggaaagtccagttctcaatataccacaagtctcttcttaccctgccttccatttgggaaagttctttggtttctccccggtagccggtgacttgcgcccatccggtaattccgggtttgacaaggtggcgcatcatgtatttgttaatcagttgggaatattcctctgtatgtttcagcatatggggtctgggacctacaatggacatctctcctttgaatacattaatgaattgcggcagttcgtccagattgcttttacgcaggaagttgccgaacttggtcttgcggggatcattcttggtagcctgcaatgaatcggacaatgcattcactttcatggaacggaacttatagcatttaaagattttcccgttttccccgtttctctcctgtttgaagaatatgggaccaggtgaggtaattttaataataagacctacaatcaggtatataaatggaaaaattgtaagtaaaaacagagaggaaaatgtcaaatcaaataaccgttttgccagtctgtttaccgggttctgcaacggctcggtacggatggacaatacaggaacttcacccaataattccagttgcagctgacgctttatgtaattacgtacatgaggtacgctatagaagcggatcagattgttctcgcaatagttcatgatggccagaatatcatcctttctgctggatggcagaccacagtacagttcgtgcacggtgttatgggacaaccattcaaataattggtttacaggacctttaaagggaatcccttcggggtaattagagtccttctcatcatagaaaatgcctaaaaccctgtatccgtaagtcaaatcgttcaacgtatggtacagctccaccatattgtccccgtcgcctatcagtacagtggtgtgcaggttcctgccactgcggcggaacattttcacaaagaaccgcaatgtcagtcgccatcctatagctaaaggtatgaaagacagatagaaagcaagcagatagatgcgtgagaagttatctaccttaataatggccagcaccgtgaggaagatgactacatgcaagctgattgttcctaacaggcggcctacaatctgttccggacgcactatgcggttgtgcagtatgaccccaaagatggatatgcagggaatatagcacaggttggaagtcagcaggtaggttttcaatgaaatatgggctatggcctgtgaatctattcctttcagaataaaaaacacaagtatcatagaaaggttcaacaaggcaaaatcacctaatatcgctactagtttaattatatcagagttttcagttgtcggttgtttcatgacaaaaaaaatgttagtcgtatgcaaatataggacatataaattaaaacgcaatactttttttaaaaaataatacttatctttgcggtcatacaacgtaaaaaatgaatcatatgaacatcaagaataatcacctcgttataatggccggaggtgttggaagccgtttctggccgatgagtactcctgattatcctaagcaatttattgatgtactgggttgcggccgtacattgatccaacttacggctgaccgttttcaggggatctgtcctccggaaaatatttgggtggtgacatcagagaagtatgcggacactgtaaaggagcagttgcccgatattgctgatgatcatatcctgcgtgagccttgccgtcgcaatacggctccttgtatagcatacgtcagttggaaaataaaggcacgtaatcctaaggccaatatggtggtgacccccagcgaccacattgtgatgaatatcgcggagtttcagcgggtgattaattcggcgatgaattttacggccgattcggacgctatccttaccctgggcatgaaacctacccgtcctgagacgggctacggttacattgaagctgatctcagtgtaccttctaccgccaataaggaggtattccgggtgtattcttttaaagagaaacccgatctggaaacagcccggcgctatattcaaaaaaataatttcttctggaatgccggtatttttgtgtggaatgtaaatacggtggtgaacgccctgcgcgtatatcagcctgccatttcgaaggtgttcgagcgtttgcttccttattattatacggacaaggagcaggaaatgattgaccggaatttccctttgtgcgagaacatttcggtggattatgccattatggagaaggcggatgagatttttgtccttcctgccagctttgggtggagtgatctgggtacttggggatcattgcacgagaatttgccgaaagatgcccataataatacgcagataggtgagaatataaagttgtatgaaacccgtaactgtgtgattcacactacacaggaaaagagggtggtggtacagggactggacggatatatcgttgctgagaagaataacacattgctgatctgccggttgagcgaggaacagcgcatcaaagaattttcggcggagtaaatattctttcttgtatatattttatttctgcatacatggagtgtatgctgtctgtcatctgctgttctgttgggtcattccgccctttgccatgccgaaaggcagatagcagtagatagctatgtgatatgaaataaccaagagggcttgcataaggccatttacaataaacgaaatgaaaaaagtagctttaatttcaggtattacaggtcaggacggttcattcctggcagagtttttgattgaaaagggatatgaggttcacggtattctgcgccgttcttcttcattcaataccggtcgtatcgaacatctttatctggacgagtgggttcgtgatatgcaaaagacccgtctggtgaatctgcattggggggatatgaccgacagtagttcgctgatacgtatcattcaggctgtacagcccgatgaaatctataatctggctgctcagagccatgtgaaagtaagtttcgatgtacccgagtacacagcggaagcggatgcggtaggcacgctgcgtatgttggaagcggtccgtattctgggcctggaaaagaagaccaagatttatcaggcatcgacttccgaattgttcggactggtacaggaagtgcctcagaaggaaacgactcccttctatccccgttctccgtatggggtggccaagcagtatggtttctggattaccaagaactatcgtgaaagttacggtatgtttgccgtgaacggcatcctgttcaaccatgagagtgaacgccgtggtgaaaatttcgtaacacgcaagattactttggctgccgcacgtatagcccagggatatcaggacaaattgtatctgggaaatctggattctttgcgcgactggggctatgccaaggattatgtggagtgtatgtggatgattcttcagcacgatactcccgaagattttgtcattgcgaccggcgaataccatacggtgcgcgagttctgtaccctggccttcaaggaagtgggcattgaattgcgctgggaaggcaaaggggtggatgaaagaggtatcgatatggcgacgggcaaggaactggttgccgtcgatcctaagtatttccgtcccgccgaagtggagcagttgttgggtgatcccactaaagccaaaacgttgctgggctggaatccccgtaagacttctttccccgaactggtgaaaatcatggtgaagcatgatatgaagttcgtgaagaaactgtatttaaaggctcaaatagcagaataatggaaaaaacagccaagatatatgtagcaggccaccacggactggtggggtctgctatatggaataatttgcagcaaaagggatataccaatctggtaggccgttctcacaaagaactggatttgctggacgggcaggctgtgaagaagttttttgatgaagagcagccccagtatgtcattctggcagcggcacatgtgggaggcatcatggcgaacagtctttaccgtgccgattttatttatcagaacttgcagattcagcagaatgtgataggggagagtttccgccatgatgtaaagaaactcttgtttttgggaagcacttgcatttatcctcgtgatgccgtacaacccatgaaggaagatgtgttactgacttctcccttggaatataccaacgaaccgtatgctattgcgaagattgccgggttgaagatgtgcgaaagctttaacttgcaatatggaaccaattacatagccgtgatgcctacgaacctttacggtcccaatgataatttccatttggagaacagccatgtgctgcctgccatgattcgtaagattcatttgggaaaatgcctgaatgaggggaactgggacgcggtgcgtaaagatatgaatcttcgtcccgtagaggggatagacggttcgcatacggatgaggagattctctccattctgaaaaagtatggcataaccgggcaggaagtaactttgtggggaacaggcaagccgttgcgtgagttcttatggagtgaggagatggctgatgccagtgtctatatcatggagcatgtggattttaaggatacctatgctgccggctccaaggatatccgcaactgtcatatcaatatcggtacggggaaagaaatcaccattgcccaactggcggacaagattgtcaaggaggtgggttatcagggcaaactgacttttgacgctacgaaaccggacggcactatgcgtaagatgacggatgtaagcaaattgcaccggctgggctggcagcataagattgatatagaagaaggggtacacagaatgtaccaatggtacttgtctaaaggatgaagatgtaagattatagatcttgcgggcataagattataaatctttcacatgcaagattatagatctttcaagcatgacatataaaaatttccggcataactttcaagaagctatgccggaaactgccctaaaaactatgtggatagattgtaaaaatcttctgccgttttctttattctttcgggaagcattttttattttaccgctttcagtgcggcctcataattcggttcctgggttatttcgggaacaagttcggtataaaccacttttccttccgggtcaatcactacaaccgagcgtgccaataatccagccaaaggaccatcagtcatcaatacaccatatttttcagcgaaatcggaagtatagcgataatcagacaaaggaataacgttggtgatgccttcagtagtgcagaagcgtccctgggcgaatggcaggtctttagagattgccaataccaccgtattgggctggtttgcagccagctggttgaacttgcgtacggaagtagcgcacacgccggtatccatactggggaaaatgttcagaatcagatatttgcccttcccgtcttttaatgtataattgctcaaatctccttttaccaatgtaaattccggagctgaagttcctgctttcacaaattctccggctagtgttaccggtgtgcctttaaatgctgtttttgccataattttattatattttagttcgatactgtaatgataacaaatttaaatggaaaaaagttcattcttttttattttcttcctttataaatcaggaaacctactattaaaacgccgatagctataaagcaatatcctaactcgtggctgtattcggtgacggtactcaataactgctcttcgggaaccactgattgcagatagtaaccgatggctgccaggatggcattccagatacctgctcccagcgttgtgtacagcaggaaagtggataatttcatcttggccagaccggcaggaatggagataagctggcggacggcaggaataagacgtccgataaaggtggagagtgccccatgcttgtcaaagtagtgttccgcgttctgaaccttggcttcatcaatcaggcacatgtgtccgaagcggctgttcgcaaatttataaaccagcggacggcctacgaaataggctatataataattgatgatggctcctatattggctccgatggtcgcaaatataactaccagaaatacattcaggtcactgtttcctccggcagccttataggcggcgggcggcactaccacttccgaggggaaagggataaaagagctttcgatggccattaataacgttattgtccaataattcaagtggtccagacaccactggataaatgcaactgattccataaaattattataaatatttgtttaagttaatcttgcctgtgctgacatcttctttaatggcacgcagcgcttcattgaagtaggtgtcggtcatcagtatggtatcgccggttcccatggtggcgtacatatccggaatttcttttctgattttagccagatagtgcatgaacgaagcggattcctgctggtggtaataaccgtaagccagaaaaaagtaagtggcatcggcatcctccggaaattctttgtttattagttcgaagtactggttggcatattcaaaattatgttcgtcaaaatatagagagccgattttgaacagcacatcaaaccgttcctccttcggagtaaactccaatgcacgtgtgaattgatgttccgcattgcggaggttgttttcttgttcctcttcgctgatatcgcttttttgagcttctattgtaaagaagcgtccggctgcgatacgtatttcggcatcatgttcgttcagctccaatgcttggttgatatatttgtatccgttttcggtatgccccagataggcatgacagagcgccgtgtcagaatataactcggccaattcgtagtcggtcaggcccgatttccggtttatcagcttttctatatagctgatggccgaagcatgatcccgcatctccagatagatttgtgccagtgccagataggctttcgtcttgttcttgctcacattggccagacggagatagtagtcgcaggattcctttaaattgcctgcctggtggtaaccaaatgctttcaaagtcaatgaatctgtattttcatcatcaatggctaatgcgaaatccaaggcttcgttcgcctcttcgtattggcattgttgcagatggcatttccccagttcgttccaatgctcgatggaatagggatactcgttcagggtcatgttcaggtaggggatggccaagtcgggcttgttgaacgtgctgtaataatcgcacagcacatcgcggaggcgttggttggttttgggcagggtttgcatgtcggaatgagcaaacaggcagtctacccattgtccggcatattcttcctgattggcgttggtatagtcctggatgatatccagcagcgtatccacttcgtactcctcgtccatgaccagttgtttgaatatctcctcggcctcttctatgcggtcctcctccatcagcatgtcagcttgcaggaacctgcattcacggtcggtgctgttggcgatgagttgcgctaccactttggcttcttcctttttgttttgcagcatcagggagcgtatccggaaaaccagggcgtctgtgttttcgggatgtaattggagagtgaggtctatggccttgtctgcatctttatgtcttccttttaaagtgtagtattcggcgatatcgatcagttcatcagcttcaaaataagcgggggtatggttctccaccataccctcgtattttgccaatgcttctttaaattccgggtcttcaaagtaagaagacatgtcgtagttcataagcttgtttttatttattgattttgctccaggtatcttttaaagatacggtgcggttgaacaccagatgttccggtgtagagtctttgtctacattgaaataaccgatgcgttggaactgcaagtaatccagcggtttggcatcggccagatatttctctacatagcagttggttaatacattcaacgaatcggggttgatcatttctttcatggcttccagtgcgtcgcagttctttgcttcgcggatggcggccatctcatcacgcgggttctccactttccacaggcggtcgtacaggcgtacttcggcaggcagacagtgtgcgcagcttacccagtggatggtacctttgattttgcggttgctgcccggcatacctgttttgctgtcgggatcgtattcgcagtatacctccaccacgttgccgttgtcgtctttcttgcagcctgtgcatttcacgatgtatccgcttttcagacgcacttcctgtcccggagtcatacggaaatatttcttcggggcgtcttccatgaagtcgtcgcgttctatccacagttcgcggctgaattcgatggtgtgtgtgcctgccgacggatcttccgggttgttgacagcttccatttcctccacctgtccttcgggatagttggtaatgatcagtttcaccggattgatgactgccgatacacgggtggcacggctgttcaagtcttcgcggacagcactttccagcagggcgaagtcattcagggcatcgtaagtggtataacctatcttgtctacaaatttgcggatggactcaggcgagtagccgcgacggcggaaaccgcagagagtcggcatacgggggtcgtcccaaccgtttaccagatgttcttttaccagaatcagcaggttacgcttgctcatcaaggtgtagttcaggttcagtttgttgaactcatactgatgaggacggttgtcgtccagatctttaccctcttttacccagtccacgaacaggtcgtacaacggacggtggggtacgaactccagggtacacagcgaatgggtcactccttcaaaatagtcgctctgtccgtgtgcaaagtcatacatggggtatgctttccaggtttcgcctgtacggtggtgcggagtctttaccacacgataaataatagggtcgcggaagtgcatgttggggcttgccatgtctattttggcacggagcaccattttgccttcttctatttcaccgctgttcattttgttgaacagttccaggctttcctcgatgggacggttgcggtaaggactctcggttccgggttgggtgggagtgcctttttgtgccgcgatttgttcggagttctgttcgtctatataagcctttccttcctttatcagattgacggcgaaatcccataattgctggaagtagtcggatgcataatattcgtttccccactggaatccgagccattggatgtcctccttgatggcttccacgtattccatatcttctttggtcgggttggtgtcgtcaaaacgcaggttacatacgccaccatagcgtgcagctatcccgaaatccagacagatggctttggcatgaccgatgtgcaggtagccgttcggctcgggcggaaagcgggtttgtactttccctccgtttttaccttctctcaggtcgttctcaactgcctgttcaatgaagttcagacttttcttctctgtagcttctgtagcgttcatttcagtcattgtgatatcaattttacacttttgctgcaaaagtacgcattctttttgggatatcctttatttcacaggaatatatccaccgttttttataatattttgcccctggggcgacaggatatagtcgatgaacggggttactttttccttattggctacgttgtaatagtagtaaagagggcgtactacggggtaaagtttcttctttccgttttcaaggctgggcagtacatagtgcttgccgtcgtcgtaggaaacggcgatggctttcacccggggggacaagtaggccagtcccacatagccgatagcgcctttggtctggcttacagactggatcacggctccggtggcgggcatggacaagctgctgctcatgtagttcttgttcttcagggcgctttctttgaaaaattcgtaagttcccgaagaggtttcgcgggaatagacaatgattttcatatcgggtcctcccagttgcttccaattggttatcttgccgcggaatatggcttccagttgctggcgtgtcagttggctgacagggttggacgggtttacaatgacggccagggcatcatacgctatgattacttcctccacttcctgtttggcggctttcagtttcatcttttcgctgaatttgatgggacgggaagccatagcgatatctgtcgtgttgtccatcagggcggaaattcccactccggttcctccgccggtgacggttacccgccggtcgggatcatctttcatgaaaatctcggctgtttcctgtgacacaggcaacaccgtgtcactgccttttatgcgttgtgcggtaatattcagactacaagccaatagaataaaaagaaatagagcttttaattgattcataagttcttatattaattcgtgtgcaaaagaaacgttttcttgtgtcatttgttttactggtgtgttacgattctgttacgggcaatattcgccggcaagggtggattgaatccgtccttgcgggaaaatggcaataagatcaggattgtctttgcttgtaacaagtttgtaatataattgtagcaaatacttcaagcttctttcatatcaccttaatataaagaggctttttttgcatcggttattaaaatagaagactaaaactgtatgaaacgagtttgggaaaagattgtagaagggatattgacttgcagcggttttgtaacgagcattactattttgctgattgtcgtattcttgtttgcggaagctttgggactttttaataaaaaagtcatagaagagggatatgtgctggcggtgaataaagccaatccggtgcaggaactgagtgcggcacaaataaaagacgtttttgacgaagagattaccaactggaaagagttgggaggaccggacgcggaggttaaagttttccggttggaggatatcacttcctatttctcggaggaagagctgggagccgaatacgagaaagccccccggtgcatcggcgagatcgttgccggtaatccaggcatcatcgcctttgttccctccaagtttatagagaaggattttccgggccacctgctgaaagacgagtctatttcttttgacgaggtttttgctggaaaggaatggttccctacggctactcccgcccctcagttcggatttcttcctttgattacgggtacgctttgggtgagtttctttgccatcctgttcgctttgcctttcggcttgtcggtggcggtgtatatgtccgaggtggccgaccatcggacccgtagttttctgaagccggttattgaattgctcagtggtattccgtccgtggtctacggtttctttgggttgatagtcatcgtaccgcttattcagaaagtctttaatctgcctgtgggcgagaccggattggccggaagtattgttttggcgatcatggcactccccactatcattaccgtaagcgaggatgcgatgcggaattgtccccgtgccatgcgcgaagccagtctggcattgggcgctacccgttggcagactatatataaggtggtaatacctttctctgtttcgggaatcacttcgggcgttgtcctgggcatcggacgtgccataggcgagacgatggcggtgctgatggttacaggaaatgcggccgtgatacccaccactattctggaaccgctccgtaccattccggcgactattgcagcggaactgggagaggctccagccggcggcgcgcactatgaagccctgttcctgttgggagtagtgttgtttttcatcacgatgcttatcaactttagtgtagaatatatttcatcaagaacaaataaataatgtactgatttgccggtgtgctaatgatcatgcggcacacagcgtagccaatgggtatatggatagattgacaaatgattaattaagtatttaaaatatgaagcaagatgttttccctgtcgggcaaggggcgcgtaaaagacgttcgcaatggctggcattcggcattttcaaactgttgagttatagcattgtcctcattctgttcgccattctcggttttattatatataaaggtataggagtaatcagctgggagtttctgaccacggcgcccagtgacggcatgacgggtggcggtatatggccggccattgtaggtactttttatctgatggcgggcagtgcgctgttcgcttttccggtgggagtgatgagtggcatttatatgaacgagtatgcgccgaaaggcaagctggtccgctttatccggatgatgaccaataacctgagcggtattccgtccattgtgttcggtttgtttggtatggcactgtttgtgaaatacatggggttcggcgacagcatcctggccggttctttgacgttgggattgctttgtgtacctttggtgatacgcaccaccgaagaagccttgaaggcgattcccgacagcttccgtgaagggagtctggctttgggcgcgaccaagctgcaaaccatctggcatgtgattctgcctatggggatgcccaacatcattaccggactgattctggctttgggacgtgtatcgggtgaaacggcgcccatcttgtttacgtgtgccgcttacttcctgccgcaactgccgcatagcattctggaccaatgcatggcattgccttatcacctttatgtgatttctaccagcggaacggatatggagtcacagcttcctttggcatacggtacggcgttggtactgatccttattattttaattataaacctgttggcaaatgcactccgccggtatttttccaacaaagtaaaaacgaattaataatttgtcggtgtgccgatgggttgcgctgtgtaccgcacggacattggtacattagcacatagacaaatcagcaaattattaaaacattaagaatatgaataagatagatgcaaaacatgtaaattttttctatggtgattttcaggcactgaaagatataagcatgacgattgaagagaaatcggtggtggctttcataggcccgtccggttgtggcaagtccaccttcctccgtctgttcaaccgcatgaacgacctcattcccggctctcgtctggagggggagattttgattgacgggagaaatatatacgacaagtccgtgcaggtggacgagttgcgcaagagcgtagggatggtctttcagcgtcccaacccgtttccgaaaagcattttcgagaatgtggcctacggtcttcgggtaaatggggtgaaagacaatgagtttatccgccacagggtggaggaaaccttgaaaggagccgcattgtgggatgaggtgaagaataagttgaaagagtctgcgtttgccctgtccggtggtcagcagcagcggttgtgcatagcccgtgccatggccgtatctccttcggttctgcttatggatgaaccggcttcggcactggaccctatctctacagccaaggtagaagagttgattcatgagctgaagaaagaatataccatcgttattgtcacccacaacatgcagcaggccgcgcgtgtcagtgacaagacagccttcttctatatgggcaatatggtggaatatgatgatacgaagaaaatatttacgaatccgggcaaggaagcgacccagaattatattacagggcgtttcgggtaaagcattcatcacagcgttgcacagatgggagataagataaagctggaactgatgtgccacagcccgatgcgggcttgcttgcttttcagatctaatggtacggatttgtctttttattcttctgtccggaaaattaaaatcagtgtgaatctgcgcaatctgcggtgaaagaaataatgataaacaaaacaagaattaagaatatggtgaaatttatagaatcagaacttgtatcactgaagaaggaagtgaacgagatgtggacattggtttacaatcagctggacagggcaggagaggctgtgctgacctttaaccgtgaccaggcacagcaagtcattgtccgtgagaaaagggtgaatgcgttcgagttgaaaatagacagtgatgtagaggacactatcgctctatacaatccggtagccattgacctgcgttttgtgctggccatgttcaagataaacagtgatttggagcgtttgggagattttgccgaaggcatagcccgttttgtggtgagaagcgaggaaaccgtgctggatagtgaactgctccacagcctgcgtatagaagagatgctgagacaagtgctcggtatgctcgaaatgaccaagaacgcgttgaatgaagaaaatctggaattagccctcaatgtattcagtaaagataatttgctggacgaaatcaatgcggctgcccctgccgtccttacaaaatatctggaaacacaccccgataatttcctgacttgcctggaactcggcaccgttatccgtaagctggaacgtgccggagaccatataaccaatatcgccgaagaaattgttttcttcatcgatgcaaaggtgctgaaacatcgcgataaggtagatggacatttcttgggaaaagaaaaaactcattaaaatgctgttttagtctatatttttgctacctttgtatatataatgaggccgataaagatcattttgaataataatctgccaaaaaagacagaaaaatctaaaaacatgttgtatggcatagttttttatttggctggtttaaaaaaaggctcgatatttgcatcgttatcctgaaaacaatctttttaccttaaaaaaaaactaatacctattgaaaacttaaaaagggggctttgtgaaaagaccccttttttatttgctgcataatggttcttccggtgttaaatttcacctatttattggtcaatatgtaagatttctgtatttattagcttatattagcaactttcttttaagttaatgcttaactttgttccctcataaaaatagcggtgaaaagaatgaagacaaaatatatcaagtcgtttctactatttttgttattaggatgctgcatttcggtgtcagctcaaaatatacaaggcgttgtaacagactcattgacgaatgaacccataccctacttgtcagtcttttatgaaggaaaaggcgtaggaagtattaccgataatgatggaaattataaggtcgaaacccgtaaaggctggaataaactcaccttttcggcggtgggatatgtaacaaaagtggtgaatataattcccggcgtcaccaagaacctgaatgtgaggatgagaccggatgatatcatgctggacgaagtggtggtgaagcccaaacgagagaaatactcccgtaagaataatccggcagtggaactgatgaagaaggtgatcgctcataaaaagaataataagctgagcgagaacgattactatcagtacaataagtatcagaagatcacgatgtcactgaatgatgtgactcccgagatgctggaaaaaggcatgtataaaaagatgcctttcctgaaagaccagatcgaactttgcgaggaaaccaataaattcatccttcctatttcggtggacgagaccgcttcgcagaaaatttaccgtaaacatcccaagagtgagaagaccattatcaaaggaatgagctctacgggggtgaacgagctgtttgcaacgggagatatgctgagcacggtgctgaaggatgtatttacggatgtgaatatttacgacaatgatatccgtctgttgcagtatcctttcatcagccctatttcgtccagtgatgccatctctttttataagttttacattatggacaccacattcgtggacaaggacaagtgtttccatctcaccttcgttcccaataactcgcaggacttcggttttacggggcatctttacgtattggccgactcgtcttatacggtgaagaaatgtacaatgaacctgcccaagaaatcgggggtgaactttgtagacaatatggatattattcaggagttcgagcaattgcccaatggggagtgggtgttgaaaaccgatgacatgattgtggagatgaccttgatgaagatcatgcaaggattccagatacgaaggactacccgttactctgattatgccttcgatgagcttccgcagcaacttttcaagcgtaagggggccgagatcaaagaggcggacgccatgatgcgcggagacgatttctggaatcaataccggccggttccgcttacgcagaccgagagttctatggatatgctggtaaagcgtctggagcagatgccgggattcaaatatgtgatttttgtattgaaggcgtttatcgagaactttgtggaaaccgggaccaaggagcatcccagcaaggtagatatcggtccggtaaacaccatgatctccaataactatatcgacggattgcgtctgcgtatgagcgcgcagaccacggccaacctgaatccgcatctgttcttcaagggatattacgcttacggattcaaggatcatcgttccaagtatatgggtgaggtggaatactctttcaacaagaaggaatacctgccgcgcgagttcccgaagaactccatcacgttcagctatcagtatgatgtgatgtctcccacggataagttcctgaagacagataaagacaacgtgttcgtatctttcaagacttctacggtagaccagatgtcctacgtgcggaatatcgccttgaagtatgagaacgagacacagtttggcctgaagaccacggtggaagtgaaacacagcacagacgagcctaccggcggtctggcctatataaccaatgatgaccagaaaacgttggttcctgagattcagaccatggaagcctccctggccttccgttacgctccgggtgagacatttgtcaataccaagcaacgccgtattccggtttcttttgacgctccggtatttacgctgtcgcacacggccggtttcaagggcgtgctgggcggagagtataactataacttgacagagatcgggctgtacaagcgtttctggttctcgtcatggggtaagatcgacatgttcgtgaaaggcggtgcgcagtggaacaaagttccgttcccgttgctgatcatgccggcggccaacttgtcctatatcctgcagcgcgagactttcaacttgattaataatatggagttcctgaacgaccgttacgcctctctggatgtatcgtgggatttgaacggtaagattttcaaccgtattcctttgctgaaaaaactgaagtggcgtgaggctatcggcttcaagatgctgtatggtcatttaaccgacaagaacaatccgatgaagcatccgggtgacagcgagctcttcctgttcccgacccgtgacggacgtcctaccagctttgtgatggacccgaagaccccgtacatggaatgctctgtgggtattcacaatattttcaagatattgcacatagactatgtccgccgtctgaattatctggatcatcccgatgcgaacaaatggggcgtgcggtttatggtgatgatgacgttctgatgcaaggagagaactccgatggagtgtgaaatgaagaaaccgaggtaagaacttgtatcgttcaaataaaaggtttatctttgttccagtacctaaagttggtgaaaagtatgttatgcttagatgaatgtaaggcaaagttagttagtttcaaacaatgttttgggcatgagtttggaattaaatcaattggtatcttcggttcggttgcacgtcaagagaacagggaagatagtgatttggatattgttgtagatattgataatcctactttatccactatgtacactttgaagactgttttgacggaaatgtttcattgtgaaattgatttagtgcgtttccgttcctcactgcctccatttttgaaacagaatattgaaaaagaagccatttatgtataaaggaggacgactaaccatttgcgacaggttaacccagataaaagaatccatttactatatacagcaatggagtaaagaaataaattgtgctgatgattttttagcctccatggataaagtgatggtgttcaatgcatgtgttatgcgccttcaagtaataggtgaacaggtaggaaagttgttgtttttacaaccatcaccgctttctgaatataaggaaattccttggttggctatttatgatatgcgcaatcttatttcgcatgaatatagtaatgtagacgagcagatagtatttactactataaagaatgaccttatagaattggataaggttattacagtcctattgaataaatatttgtaaaacttgaatcttttattgtgattacgaaatatacccatctcttattttcttatcaaaagtaagttttcctattttttaagcgcttttattgtgtaatacacaattatagtgtatctttgtgccctcaaaaagtttctaaattccttttatataaagggtaaagaaccttttttgagggtataaacatgtctataaaaagcagacagaaaagacgtcttcggacgaaagaaacaacaaataaaagatttcagaaatacaaaatgaaatctgtgtaaaatactatttatcagccagttataaacactgcgctgatatggtcttccagtatcggtcagcgtggatttctgacgataaacctcatgaaaaagctatcccatcagtttgataaaccgaagcgttctgtggcatctcccgaagcgttggaggctttgcggaataacaatgccgtgcgttggtatgtgttgtcgcttcccgactgtcatcggggaggagtgcgcggtttgcaacgggaacaggaccggcgcatacaggcaggcgagccctcattcggcttttttgctccttcctatcaggaagtgaggcgtatagacggcaaattcgtcaatacccagcgtcccttactcttcaactatgtatttgtccgtgcctccgagcgtgatgttttccaactgatgcaacgttttcctgtactcagtttcctgcctcgggtgagggaacggaagcgggagtattttccttacctttccgatgccgcaatggagaatttgcagtgggtggcccgttcttattccaatacacttcctgtttatataccccagccggatggtttgcgcaagggcgaccggatacgcattaccgagggacggtttaagggggtggaggcgactgttgtcattcagccgggagccggtcgaaaggatgtgatggtatgtgtggagaactggatgtgggttccgctgctgcgtgtgatgccgggtgagtacgaggtaattgccctgaatgatgaggacaagcatgtatatacccgtctggacaatgactgtatgttgaatggtttgcacagtgctcttcagcgttatcacagtgtggagggggtgagtgaggaagatcgttccctggctgccagggcgttgaaagaatatggcaatctccggatggatacggatgtgatgcgttgcaagctttatgccattttgctgccggcttatactatattgggtatggaagaagaggcggcaaagctggttggcgttatgcagactatgcttcctctcgtcaaggcggagcagtcgcgtgcacttgctgtggttacactttatggttgtacggatagcagtatctattatcatttggcgcacgaggcggttgatccgtggaagaaagaggaaaagccgaaaaagagtaagcagcagctgatcaaccggttggatgattatgatcggtggttgaggcattgaatattactgagcagaacaaggatcttaggttgacaggagaggttatgaagcttgtcctagaagattttatagcttaaagacaaagcttgagagaaagatgtctaatttaaagcaggtttgcgaaaagaactgttgaaaaaagcaaattatgcaagtttctggagtgtcagttaaaatcgatgcagaagaaattagaatatgctaacttgcagctcttcggggatagacggtggaagttaaagccgaaaatgactgatggtgggcttgagaaagtggattctgattgaaaaaaagagaaagatgattatgatggtatcgatgatgctttttgtacggactcagttaataatcaatctcaagaagtaaaagagccttctaagaaagaacgtgatttatccgattgtcttgatgagcataaaacgatgggtgtggttggagatccggttgaacatctttctgatttaacaaaggttctgattctggaaaaaatatttgctttttgggatgatggagaactatcgatagataacaatcttgccgagcaaactatttgaaagcttattactcaacgaaataatttctttcattatggtagtgaagttagagttgaaacggctgccatatattatagtgtgattggtacggtaaagcttcatggtggctctatctggaacttcatcggaacttttttcaaaaatatctttaacggatgtagggatgatgctaatatgattcctgacaaaatccttcggctacaagccaatgttgaattcaaaactaataaattaacaaaactcggattggggcactgaaaagtgccctttcaaaggggaatgccataaattgagtgcttacagaatttaataaatcttgtagagaaagatgaatttaagcgtttttcatataagatatatcaaaagagtatgttgacgaagattaaattaaaatttcatcatattgtatttgacttctttagctttataaagaaagggaatgaaagaagtataaaggctaaaaagaatatattagccatgctttttctaaagggagggaatatattagtaaatctgatgttaattcctataactataaattatgtgaatgcggataattatgggatatggttaactgtaagttcaattatcagttggatgagttttttcgatatagggataaataatggtttaaaaaataagtttgctgaagcgaaagcaatgaataatgaggtacttattcaaaaatatgtcagtacaacttattttgttttggctctaatttttgttcctttaatgattttattgttgatagctaatacttttatcgattggtgttcgtggttgaatgtttcttttttattaaatgaacagttacaaataataatcgctattgttgtaatatatttttgtattaattttgtcttatcaaccattaatgttatattaatagcagatcagcgtcctgctgaatcttctgcaagaacattggtacaacaaattctttcattaattgtaatatatgtattaactcaagtaacccaaaaggatgaattgttatatttatccttagcattttgtggtatccctttattgataagtctttattataatgtattactttttcaaactcgttataaagcctatatccctcgtctttcttgtattgataaatcattatataaagaactgttatctttaggatctaaattttttgtgattcaaatagctgctgtaatacaatatcagacgattaattttttaataatgcgttattattcggcctctgatgttacgtgttatagcgtggcatataaatatttcagtattttatctatgatttttacaatatttatagctccgatatgggctgcaacaacggaagcttatgcgaagaaagacttcaaatggattagaaatatagtgcataaatatttgcttatatgggtaggattggcatgtgtcggagcattgatgcttttgttttcaacatatatatataaactttggttgggtcaagatattggcatttcttttaaattatcattggtcgtatatgtatatactttagtatttatgtttgggagtatttttgttaatattttgaatggcatcagtgctttgtatattcaattttggagttctgtattctctccattgttatttatagggttatgcatcttttttatcgaaaatcagattggttttcctgcattgatattagctggttgcttagccaattttaatggatttataattgctcctatacaatactacaagatattttataaagatagaaagggaatatggataagatgaaagaaatgcgaatagtacatataaatttatcaggttccaatggaggagcagctattgctgcgtatagacttcattgtgaaatgagaaagaatgggttggattcaaagatgctggttgcatttcaaggaattcgtagtcgtcaggagggggtctatcagttttcaataaggaaaaaactgcatcataaggtcaatgttatgataaatcaattactttatcctgcaagtaaaataataggtacatattcttttgcttttaatggttgtgatttgtctaaagaaaatgatataagagaggctgattttatttatttacattggattaatatgggaatgctttctatttatgatgtggagagaattttaaaattaggtcgacctgttttttggtttatgcatgatatgtggcctttaactggcgggtgtcaccatgcttttgattgtacaaaatatttagaaaaatgtattgattgtccattacttcatagaaaacgtgatatgttattttgcaaattccaatttgaggaaaaatatagaatttttagtaaatactcaaatttgaaaattattgctccttctacttggctatttcatctagcctcaacaagtcttttgtttaaaaataaacaattgattcacattccgaatctttgtgatataaatatatttaaaccgatgggaaagggttgggccaaaagattatttaatctttcagaaagtaaaaagcttatattatttggggctgctacaggggggatgggaaatatatataaagggtgggaatatttgcaaaaagccattttgcatttatctacttcttcctatgaggctgttatatttggtgagtataataaaacagtagagaaacagttacctattaaatgtaattttatagggaaattatatgatgaatattccctttctgttttgtataatgctgctgatgtttttgtgacgccttccttggcagataactttcctaatacaattttggagtctttgtcatgtggtacaccagttgttgcttttaatgtcggggggatacctgatttaataatgcataaatctaatggctatttagcacattataaagattgtgaggacttgaaaaaaggaatagaatggtgtgtttcacaatattctattcaagaggtttgtaggtcttctattataaaaaaatatagtcctagtttgattatagagaaacataaaaagctgatgtatgggaagatttaaatatatacccttattttggacttctttaggagtgtttctttttacatttaaattttattttataacttcctatataggaagtttatggtcaaactttttttttatatttggtattttatcttttattttttctttttatgtaaagggaagtcaggttgttctcccttttgccggtgttttaagatatatatatgttttttatttgttatggtctgttttagtcattgtacgtgcttctgttgaaggtgcaccaatagaatggaatatgcttatttaccaaccagattatttttggcaatattggataccttttatattgctatttggtatccggtatttaaattttaaggatgtgaaatgtattcttattctttctatgttggttggaatgttttatattatattaaactgggaagagattttttttacatcgcatctaaatttgtataattcatttattgctgaagaagtaagaaaaggacaggttgcatcttattttattcttccagcaggtattattttactttgtcaaaaattctattcaaacaaattggtggtttttacaatccttcttttcttgttaggttctgtaaatgctgctttgtatgcgaggcgaagtacattatttttttattttttctttttattatctggtctgttgatttatgtgaaaaaagaaaatttagtaaagttgctgtgggggatattggtaattattggtatttgtttgatactaatgtcgtcttttgactgggagtcctatttggttttattattagataaattggacaaaaacactcgatctggagttgaaatggctttttataaagatatgagttggatggattggataatagggcgtggtatgactggtacttattattgttgggaggtatctgatattgataggttgaatagattagtgatagaaacagggtatttaaatattatattaaaaggtggaatttttttgttgttaccttatgttttcttttgtattaaatccttttttttagggtattttaaatcgaagaatatgttaacaaaaggtatgggagtatattgtttagcttatgtcttttttttatatccttcaggaacaccagagttcaatttgagttgggttattttgtggatctccattttatattgtaatacatcttctatcagatatatgtctgatgaacaaattaggaataaatatttttaaaatgaaagtgtctgttataactataaattataataatatacaaggtctgaaaactaccattcaaagtgttatatcacaatcttataaagatatggaatatataatagtagatggtggctctacggatggaagtgtagatcttttagtggaatattctgataaaatatcaaaatgtatatgtgaacctgataatggagtttataatgcaatgaacaagggggttagtattgcttcaggtgagtattgcatttttatgaactctggtgatagcttttggaattctgaagttttagaaaatattttttcaaaacatattgacgttgacgtattagcaggtaaaacatattgttttaagaatggtagatttagttccatgcaatctgcacccaaaaaagtaacaatgaaatatttgtatgctaattctataaatcatcaggcgatgttgataaaaacagctttgttgcgagaatatccatatgacgagacattgaaagtatactctgattggaaattctgtattcaaacacttgtggtgaataatttgtcttatcaattcgttgattatgtgatagcaaagtatgatttgagtggggtgagtgcaaatattaagtttaaagaagaaaaacaaaaagtcttattggaatattttcctcatcgaatattgtgtgattatgagttgttgtgcaaaaagactttaatacgaaaactattgccaaagattggtcatattattcagcgtttatattattacgtttttataaagcttagaattagtaaatgtggtaaatttaaattggaggaataaaatattagaattagtgggcatttctcttttgaagctttatttaatttgaatggagtgagatgaatcatagattttagtagtgttgtttgtatgaagatactatttttcaatactggatcggctaatcctttattaggtggagtacagtctgttacgcattgtttagcccattattttaattcattagggcatgaagtatatattatttctattaatcgaacttcagattatttagatgatattcaaatctatttgccagatcaaaaacgaaatgatagtgatgcaaataaacaatttcttatgaattttataaaggaaaaacatattgaaattgtgctaaaccagacttgcttaaatcctaaattatcagtgtttttacctgttataaaaaaaacaggagttcaacttatttcagtatttcatagtcagccgtatggtatgtacgggataaaagcatttcctaaaatttgtaatgtttttggtgttgacaaggtaggaaatttagtggatgtacttatacattttgcatttaagttgaaatatggaagatatttaaaaagaatgcttcaatatagtgataaactagtgatgctttcagataaatttataaatgaatttttatatttttcggggaaaaaatatgctgaaaagatgttgtctatttctaatcctgtaactattaatgggggagggagtgaaaaaaaagaaaaaatagttctttttgtgggaaggatcagccaagaaaaaggtgtagataaaattttagaagtatggcgtggaatctgtcatgaagaaaagtataaagagtggcggttggtgattgtaggtgatggtgaaaaaagaaaacaaatggaaaagtatgcaatggatatggaacttattaactattcatttgaaggatttcaaaagcctgatggatattatgataaagcaaagattttttgtatggcttcagcatttgaagggtttggattagttttggtggaagcaatgtcgtatggtgtagtgccaatggcatttaatagtttttctaattgttcggatattatagatgatgataagaatgggattttagttactcctttttcaatcaatgaatatagaaaaaaaataatagagcttattgaaaatgatgaaaaatggatgaaaatgtccacttgttctataaataaaagtaaagaatattctatagaatgcataggtgctaaatggttggatttattttattctcttttaaataataaagttacttgagataaaccatatacagacttggcaacttcatcagtctgaaataggtaaagttgctatatatatagtgaaatcgatagggtatgacgagcaaatagaaaaagaagtgaagaggctttttattacccatggttttgatttagtaatccattatgtggatacaatagagaaaaccaaacgaggcaaacaaaaatttttgattcaagatttgaaataataatttccaagttggtattagcttattattttatgggctgaaataaataatatggaatatactcctgttattctttttgcctttaatcgtccagaaggattaaaggctataatagaatctttgcttcagaatgaagaagcaaaacattctgttctttatgtttttgttgatggaccacgtttccaacgaaaaggtgaagtggaaaatgtggaaaaagtgcgtgattatgtaaaatctataacagggtttaaagaggttcattataagtttgcattgcaaaataaaggacttggtaattctgttataaaaggtgtaacagaagttatcaaccgatatggtaaagcaatagttttggaagatgatcttattcttgcacccaattttcttttttttatgaatcaaggtcttgataagtacaaagaagagacgagtgtgttttctatttgtggatattctaataaagtgaaagtgccgaaagattattcatatgatacttatttctgcactcgtagtagttcatggggatgggctacttgggctgatcgctggaatagtgtggattgggagttggagaatttcgataaataccacatactgaaaaaagaatttaaccgatggggaggttccgattgttggaagatgctgaatgattggaaatgtggaaggaataagtcatgggctattcgcttttgttttgctcagttcttacaaaaaaaagtttccttatttcctgttacaagcaaagtgcaaaatgatggttttgatgggaaaggtacaaactgtaagcgctggagtcgttttcattgtatatttgataactcggcaaaaaaggaatttacatatccggaaaatgtgtctatccatccatccttatttcgttctgctattggttatcattccatcataaagcgaatttttagccggataatatattttgtttatagattttgatagttgatgaaacctaaaatcctttttattcttcaccttcctccacctatacatggcgcagccatgatggggaaatacattcaagaaagtgagttggtaaattcttctttcgattgtttttgtataaatttagctacagcaggaagtttgtctgatattgggcatataagtttaaaaaagctgttgaagtatttctttcttctaaagcatatttctcacgttgtaagagaaatccgtcccgaattggtttatatcactccgaatgccggaggaaaagccttttttaaagactttattgtagtgcagatgctgaaaagtatggggtgcaaagtcatagctcattatcacaataaaggcgtttcggtttatcagagtaaatgggtttataacttcttttataaacgttttttcagcaatctgaaagtaattctgttggcagagaatctttataaagatatagccaagtatgtaaaaagagaagatgtgtatatttgtccgaatggtataccaaacttacgtaaaggagaatttgaagcaaggcggaaaaacgaagtcccttatctactttttctttctaatctattgataaataaaggagtgtttgtattacttgatgcgttaagaatattgaaagaaaaagggtatctttttaattgtcagtatgtaggtggagaaacagccgagattaatgctgtacagttttcagaagaagtggataaacgggatttgaatgatagggttgcttatgtcggtcgaaaagtaggagaagaaaaaaatgctttttttcaacaagcagatatattcattcttccaacaatgaatgagtgtttccctttggtcattttagaagccatggaatataaattgccggtcatctcaaccaatgaaggcggcatccccgatatggtgaaagatggagaaaatggtttgatttttgaaaaacagaatccgtattcgttggctgattgtattgcgaagttgttggatgatgaggaattaagagttaaaatgggaaatgccggttatgataaattctgtcgtgaatttactctacaacaatttgagcacagaatgctggatatattatcccaaaatcttcctcaaaaggaaaaagaaaactaatttttaaaggtagaactacaatattcatgttattgaagttaaaaaacttacccttgttggaaagccatcgagggctgaccactttgccttccggcaaactcctgatcaacaccatcaatgcccattcctacaacaccgcccagaaagacaagctctttgccgaagctttgcagcagggagatgtgttaatccccgacggagcaagtattgtcaaggcgtgtcgttggctgaatgcaagatccaaacctacagagcgtattgccggctggaatctgttcgagttcgagatgaacaagctgaatactatcggaggaaaatgttttttcatgggcagcagtgaaaaagtattggcattgataaaacagcgtgtgaaagtggattatcccaacatcgaagtggaaacctattcgccaccctataagccggagttttcggaagaggacaatcgggcgatagtcgaagctatcaacaaggcaaatcctgatttgctctggatagggatgactgcccccaagcaggagaaatgggcgtacacgcattggcatgaattgaaaatccattgccattgcggaacgataggtgctgttttcgatttctatgccggaacggtaaagcgtgctcccgcctggtggcagagacattctctggaatggtgctaccggttattgaaagaaccccgccggatgtggaaacgttacattatcggcaatctgttgttcatgtggaatatatgtaaggagtagcttgatgaaaagaatcttattgctcgttttttggtgtagtgtttccttatgggctgatgcccaggcattgctgggaactaccggactgcttcatgctcccacggctgatatgcagcgtgataaaacttttctgtttggtggaaactatttgaatactcatccgttatccacccattttcgtagcagtgaagtggggtataccttcaattattacattaatattactattttcccttggctggaggtgtcgtatatctgtacattggtacatgcggatcatggctctacttatttcccggaacagtcttggggaaaattcacgaatcaggaccgggctttcagtgcgcgtctgcgcctttggaaagaagggtggtggaaggagtggacaccgcaaatagtccttggtctggacgatcccacctctcatgccgatcatggcggtggtgaactggtgtccggtaatacaagcggttccaataattatgcaacacgttattatctggctgtaaccaaacatttggatgttcagaatataggtgaatggggtattcatgccgcatttgtatatggtaatgccaaaggtatagagcattataaacgtccttcattcggcacaaacttccgttttcagttactcggtgaccagcctttgattaaagttgtaaataatcttaacctgatggccgaatatgacgcccgcacagtgaacatcggggcgcactaccagctttggaaagaccacatcaatctgattgccgaattgaacaacgggaaatacttctctggtggcatttacttcaaaatccatctgaaatgataaaaaagattatccgattaggatctccggaatagattttactctacaacattttgaacatcgggtgtaagggagatattgttgcaagatttatcgagtcgtatttcataggcgttaattaatgagaaacattttggatattatcattataaattctatattcgcatagaatttataaccgatataattatggaaactacagtattcaaccccatacagaggcatttgttggaaatgttttcttacgataaatctcaggaaggtctggaagaattgaaagaggtgctctttcaatattattccaaacggatgaatacaaagttggatgaactttgggataagggaattcttgaccagaaaaagctggatgaaatagctgaaatggatatccattcattaaaataacgtcaatggctaagttggttcttgatacgaattgtcttattcaaagcattcctcaaaggagtcgttaccatgtcttgtggcaatcctttgtggacggaaagaacaagctctgtgtatccaatgaaatattggaggaatatatagaaattctgcaaagacttaccgacaatgaaacggcggaatatgtggtgaaaaccatattgaacagtccgtttgttgaattgataactccattctatcactttaatctgattacagtcgatcctgatgacaataagtttgtggattgtgccatttcggccaatgcgcactacattgttactaacgaccatcattatgatgtgctgaaagatatagattttcccaaagtgaatgttgtaaatattcagcaattctgtatttatctgtcacaagaaaaataatttttgagtaaaaaggaggatttatagttggaaataaaataactataactccatgcatcctgggtgtaaaaaaccgccatagaggcagtctccatacagaggcgctctatggcggtttcccgtttccccacgtttaccggggaaaatacccgtttccgggaagccgggaggttactcttccattttgagcttgcccagttctttcaggatgtgctccatggcttctttgtaaacctccggtttctccttttccatccatttcatcagtttgaagtaagaatttggagtcacaatctttccgtctcgaattttggtggcggtggaccggcctatcgcacctttgtcgttcaagttgttggggtttaaatcgcttcttcgcacggcattactgatgcaagtgctgatgatctcaaatttttttcatgttactaaaaattaaattattaaataataatttgtaaatagcataatcatagctacttacaaaatgtctcggcaaagataggaaatatttattaacaattgcctgtttttgtgagcaacgccctatttatattttgcgttcctttgcgttatatttatactaacacacaaaagaaatggattatacagagcagtttatccggctgaattgcagcttgatgtcggattacaaaatgatgaagctgaatgccgacatgaaatgcatggggctggggttgtatcttgaaacgatattgtttctgcgaaaacagcaggaatacaaacatgattttaacgaactggatttgctggccgatcagtggggagctaccgtggaaaatctgcaacatcttattaaggacttcgatttgtttctcattacagaggacgggtatttccgatgtctgtatctggacgaggtgatgggatatcagagcaaactttccgagcaacgtgccgctgccggcagtaagggagggagaagcagtaagaaaagtacggtgaaagcatctgcaaaagcaactgcgtctacaataggaaggggcagaatcaacgaagggaaaaacggtgatacgtcctgcatggatcgtaacgaggaaatctacctgaaaagcgatgatacatcttgcatggataataacggggaagcctacctgaaaaatggtggtgtaccttgcatggatcgtaacaaggaagcctacctgaaaagcgatgatacaccttgcgtggattgtaacggggaagtctacctgaaaaacggtgatacgtcctgcatggatcgtaacgaggaaatctacacgaaaagtaatgatacgtcctgcatgaataataacaaggaaatctacctgaaaagcgatgatacaccttgcgtggataataacggggaagtctacctgaaaaatggtggtgtaccttgcatggatcgtaacgaggaaatctacacgaaaagtaatgatgcgccctgcgtgtatgataacggggaagcctacctgaaaagcagtggtgcacccagtatggatagcaaggagagaatttatatggaaagcagcaatgtagatagtaacaagactgtctgcatggagagcagcaagccaatccattcggattataataaggaaatctacaaggaaaacagcacggaaagcaacgtgaaaagtagtgcggaaagtatgaaaaatacgactgcaaaaaatacaaatgaaaattcagtcaaaaatgtgattcaaagtattgataatgagtgttatggaaagaacttgcaagcaagctttaagcaaagctttataagagaagaaaagaatagaggagagaagaaaaacaacaataacaaagaaaaagaaataattgctgttgctgctgttgataaacttccccgattttccgaattgtccgaaacgataccccgatgggaacaatgcatcaatgaagctttcattactcagagttggctggaggctgtggggatgatgtcaggtttgaaagaactctttttgaacaatctttcttttattcgtgatctgttcaagaaacatgtcgtggcacaaggaaacacaggaggaatcacttccgtgtccgaagccgaagcttatttcgccaactacatccgccgagaaaggcccacccgtctttttctggaagaaaagctgaaagaaaggagccggatgcagaatgaatcgacttcgctctcgccctacgaaacgtacaatccgctgaccggcgaacgttcgtattgcggagttcctcttcctgccgatgcacccccgcgccccaacggacgtgccacctgggataacctgaaacagagctggatatgacgcgcgaagaacatgcagattatgtgcggtggctgaaaagcctgccgcgcagaaaggaccatttccgtatgccttgtcccgaatgttccgcaacgcgaagcaatcccaaagatccttcgttcagtgtgcatatcacccgtgaagggggatgggcgaaatgctttcattgtgatttcgccatagcgtggaacgaggacgagatgtggaaaagagaacagaaacaacaagaccgggaacggcagaaacagcagaaggatgcaccgcagcaccgtaacacgtcgcagcaccacgatgcagcatcgcagcaccgtaacaggtcgcaacgcaagccgcacatccccctgcaaccgcctgtacattacgtatgcccggtaattaataaaaacaaacaaattatgaatggagaaatgatggaatacatggtcgacagacgaggtattccgatggacgtcctgacaaggatgaagatagaggaacgcttggaattcctgccgcagaccggcaaggaagaagcctgcatctgcttcccttacctggaggacggagtaatgaaaaacatgaaattccgggatgccgcaaagcatttcaagatggtgaaaggagccgagctgattccttggaacatagacgccataaaaggaaaggaaaagtgctacatcaccgaaggcgagatagatgccctcagcctgatagccgcaggactggaagaggtggtgtccgtacccaacggagccggaggcgcgaaccttcagtggctggaccgcttcgtggagtcgcacttcgatgacaaggcggaaatcatcctggccatggataccgacaagcgcggagtggagttacgcgacgaactggtgcgccgcctgggcgtggatcgctgcaaggtggtggcctggggagaaggctgcaaggatgccaacgagtatctgttgaagtacgatcttccgaggctccgccagcaggtggagcaggcggtggaaatcccgttggaaggagtcttctgccccatggacgaatgggatacgctgatggatatttattacaacggaatgccggaaggagccgatacgggactggagaatctggaccggctgatcaagttcgagcgtggttttgtgctcacggtcacaggcgttcccggcagcggaaaaagcgagtttgtggacgaaattgccatgcgcctgctcctgcgccacgattggaaggtgggctatttcagcccggagaataccccgctggcctatcactaccgcaagctgatacgccgcgtggtgggcaagcgtttcgaacacaaggggatgccgttgccggaagccggacaggccatccgttacctggcacagagtgtcttttccattatgccgaaagaggacttctcggtagagagtgtgctccgcattgccgcccaactggtgagccggaaaggagtgaaggtgctggtggtggaccccttcaaccgcttcgagcatcagattcccgactgggaaacggaaacgcagtacatcagccgcatcttcgacgagttctccaattttgccgtgaagcacaaggtgttgctcattctggtggcgcaccccaccaagttgcgccgcgaaccgggaagcaaacgctggcctgtgcccacgctgtatgatatcaacggctcggcggcctttttcaacaagacggattatggaatggtggtagaccgtaacgatgagctggggcaggtgctggtgcgtgtggccaaggtacgtttcgaccatctgggcggaccgggagatgcttttttcgccttcagcacttacaacggacgctacacgcctaccgaggagaggaccttggatcataatccgcccgaaccgaagtgggagcataccaatttcctgacagagaagctgaagcccgaacagcagggcctggggtttaatgagggggaatgaagtagttgaatgttgctgttcctgaataacttggggataggagaagggagatgtcaaaacaaaaaggacaaccccgaaaagttacagatagtaattataacacgtaaaaggatcgtatcaagctctgtatggagtaatgatacgaccctttctttagtcttttaggatgctcaaatttcagattgtaagttcatgttttcaaaaactgagttttgacactcgccttttagggcttgtagttacagtctgtaacttctcggagtagtcattttattttgacatacccactttaaaagttgcttacaagtagatcatgttgccggcaggctttactgattactggtcattcttcagtgatcactgatcattcctcattaatcactagccattaaaatcctctccaccgttcccgttttatctcctcgcactgccgtcgctgccatgcgggcattattttctccagctctttcagtttccatcccttcataaagcgtatctcgtccttttcctgctccgtgcacaggctgatgcgcagcagttcggggtagagcacctgtatatggaaaatcttggctctccacagcagcatggacatctgccagggggtgagggcttggatgcggttcagggtgagcagcatttccagataatgacggtagaaggctttgtccacggtcatgagttggtttatcagatagttcatttttattattgttaaatgaaacgattagttgaatgaagggtcaggaaatcaaagcggaggaaagggacgctatctttggagaaagcccccttggatacgttatctttggagaaacctctttgaaaacaaacggttctcattggaaaccctatctttggagaaatcatccttggatacgttatctttggagaaacctctttgaaaacaaacggttctcattggaaaccctatctttggagaaatcatcccttaaaagcggtattccttcacagcatcaaaacaagggcacggcttcacggaattcaagtcatgatgccccactatcaacgctttggggaacaggaggcgcagctcgcgcaacagtgccagcatacttcctttctgcatcagagtacgcgtatcggcaggtgtgcagtccgccgagagtcctccttcatagcagatgccgatagaatgccggttatggttcttgcaatgcgctcccaccttttccagaggtcgtccgcggtgaatctctccgtcacgggtgatatagaaatgatatcctatgtccgtgaagccccggtggcggatgtggtcccggcggcaagtctcaaaatccagcctccgcccctcaggggtggcggagcagtggataataatcagggtgatggttctcatgatcatcagatacaggcgttcaggccgagtgcgccggcaacggcggtggctacggtgataattactttcagaatcagtgtccaggtgtttttctttgttcttgaactcattggaattttgttttagaggttgataataagtgaattgtaatggaagccaagggctgaatgtaccccaatgaaaacggcttgtcacaggggcacattcagccttttagcgtcgtgcctttagcgttgtgccttgcttccgtcatacaggagttccgtcaggcctgtcctccgttttccggctccttcgcctctccggtaagatccacactggtctttccggctttcagcgccttcaccaccagtcgggccgctttgcgcgtggccaccagattgaacacagcttcctcctgcaagttctggaaacgtgttccggcactccagttcacattcagctttctgacgtggatggcaggattgtagtcggcagcgctttccgcacctatactgttgatgctgatggagaaatcccccaagtcgcccagctgtatcttctgtcctcccagaagctgttccctcatgcagtccaccgccatggtgaggatagccacgatgtccgcacgcttgtacacacagccgtggctggcaatgtgctcggcaaagcggttgatgtccatcacttccgaatactgtgcactggcgtaagccttcttggcggcatccgcgtccatcggattgctacgcataacgatactgtaatttaccataatctgttaaaattaaaagttgataattgagaattaagaaacactgttgccggggaatgaagccagtctgccgtcagtcactgtccattaaccgtcagccactggtttccgactgctgaaagaaccctatctttcacgtgtaagatcctatatcttacagctgtaagattatagatctttcgccttcatcgtcccgacattacaaagatacgatgtgcggattccggaaagttgattccggtgggttgtagttgataacagttgattctagttgattattgttggaaaaacattctttcttctcgtccgtttttcgtacttttatggaagtaaataaaaagtatggaatgtatggagaattttgagatacgcacgtatggccgcaccgaactggccctgtgttatttcccggatttgaatccgcaggtggcttaccgtaagttgcagtattggattgactattatcctcacctcagggagaaactggagaagatgggcagtggcttgagctgccgtacctatatgccggctcaggtacagctgattgtgggggcgataggggagccttgaaaggggattgtgatggagtgcggccagataaaaagaatggcttccccgattgcgtaatcgatatggcaagtgaacgaccggctcctgttgacagtcgcattgaaagattggcaaggttgatatatgtgaatgaaaatgacacgaatgacgccaatcagagatatagacccaatttgcgccattcgtgtcattcacattctggataaagaacggaatagaacctctattcccgtatttctcccttatgcaccagcattttcaccagtgtccgtttggaactgtgcgtgtccgaaacccatagcacagagtcgttttgcgcatagatgcgggcaggctgggaaaaagcatatccttttacagtttttattttcttgctccattcgttggactggcgttcgtatatgttgatggcatcattgtcaccggtagcataccagcggtcgccgcacaacgccagtgtcttgggcttgaagccgggcgacagggaaaggtcgtccagatcgatggaagcgttgtttgccatatcatcgttgaccagtgccggatcgagcacccgtattttcttcccttcataatccgtgagcagcagatgcccttccgcatcgggctgcatggaatggctggcaaagccgttgttgcccggactgccgttgccggatgcccggcggtagcggttcaccttctggtaattttccggggtggcatcctcctctttgtaaatgctgaccattccgttcttgtcgcgtgcgaaaatcagcccgtcctttaccgtcatggcctgtgcctggaatacggggccgctccattgcccgttgcctatgcaggtgaggtaggacagttccggcaaccggaatacatggatgcgcgactggcgttcggccacatacagccggttgcccgacggcacgatggcttctatctgacttccgaaactcttctccccgccgtcgtgctgccagctctgcaaggttcccagccgttcacctttctttatactgaacagcaacaggctgctgcctgcctttccgatgtttgcgatgaaaagggtatcccccagatgagcgacggtataaggggtgaaatcctcggccgtttccatacccagggtttccgcatcaatcagctgcgccgcctcatacgagtaataccagtaactgttataatccccgtttccttctccttccccgtttcctccgccgggagcggaggggtagccgcagatttcatccagggtgactttgctgcattgtgccgtcaggactccggacagcacaatcaggatataagcgtatattttcatgttgttcttactatattatataggtatacatttatttcagctcactcatggggatggcgtaaacgcatgtcccgtttttcacgcggtcggtgatgaacagcgtgtggcggcggatgcagaatttctcaggtgcttgcagggtgatgccgccgatggtggtatggtccttcatgatctctcccgtccggggattgacctcacagaacttttctgtgccgttggaacttacaaacagccttccttcgtagaaatccaagtcgtagggtacatttttataagccagttgcccggtgcgtttgggtgaaactccttcccgtatcccgtcaggggcgaacaggtctatgcgtttggcgggatgggtggagtagagcaggccggtctgttcgtccaccgccatgccgtaagtgccgtttgtctcgcccagatgttcggaacgtacataaatccgcggagtcactccggactgtatagcctgctcttctacaaagttgacgtagcgtttgtcgtgtatcatgaccagccctttgtagagcagcacatcgaaggcatgtacggtctgcgtgggccctgttccccagcttccattgcctatgcaggtaaggaactgatggctcttcgcatcaaaaatctcggtacggcttccttcgtgggtgacataaatcttgtcgttggcacgggtgataccgttcgggcggccgccgaatttcccggtagcttctccgtgcttccattccttgatgcttcccaagtgcttcttgccgccgccggcaaggccgaacacctctacgctgtactggttgtccgcatcgttcacggcatacagggtatctccgtacacatatacatccttggggcggaaggtggttcccgtagcgccgggcaagtcggtataatccagcttgaacgccaccggctccccgtcgtttcctccccggtcggtctctccgcgcaggggagacaggccaccgtccagcgcatcgagttccgggtcttcgataatgtgtttcgaagccacgtatatatcatcaaaataacggttcctgctccagcgggtgtgcaggaagcggcgggaatagacgggcagctccttgtccagcgacagcgccacatatacgttgttgcacagggtgatccatcccggacccgtctgttcgtaggtcatgtttcccgcatggccgtagcccacacagtgggcaaactcgtggaatatggtttcggtgatgcttttgtcatcggcatagtgttccagataacacacttcatgcatgccgaaggtggttcctccgcccagtcccatcacgccggtggtatagccgaaggtcagtccgcggtggttgagcacgttggccagcagggcggtcttgtctatttccgtcttgtcattgttgctgtgcagcgggccgaactcgtacagggcggtcttgaaccgttccgacgagaacatatacgccatgttcagcgcgatggccaccgcctcacgcgtgtgcgaagccttcatcttgtacttccagctgtcctgggtgtcactgtatctgccgaaggcgatgtaccatttgcaacggatggattgcagccttgtccagtacgggtcgtcacactctacggtgaaggtcaggttttcttccgtgaggtaggggtttgccatgatccgtattttctttccgctgcgggtataggcggtcaggtccttggtggcgaacggtatgtgtacccggagttgctggaaaggcatgatcttttccagcgacatgaacttgaattcttcctcgtaaccgtctatcctggcccagaaagtcacgtttttcaaggctctgggactatagaaacggagttggaaacagtgctcgtcgtccattccgaactgaagaggccggctgacgtagaagctgcgctggccggagtcgaaataaacatcctgggattcattgtcattcagcaggtaatacgtgttgtccgggttataatccgtttcggccagccggacgggcaattcgttgtttgccacgtttccttctccggaaaccggaagttcgtcctctttgcagctgcccagcagtaaaagcatacctgctaaaatcaacaggctggtggaaaaaagttttttcatcgtctgtctttattagaattacatttaaatttgaaataatcactcttttggaaaagggttgcaaaaataattgttttggatcagacggacaaagaacctgtatttcattttgtatgagtccctgttttttatgttcttttgtttttctgcctcaaaaaaataaatcctatattgttgccctgggctttgttcataggaaaatatgctgtatttttgttatccgaaataaagatgaagatatggcacaacctttagcagaacgtttgcgtccgaagacattggacgattatataggtcagaaacacctggtggggccgggggctatcttgcgcaagatgatcgacgcgggacgcatctcctcctttatcctctgggggcctccgggggtggggaagaccacgctggcgcagatcatagccaacaagctggaaactcctttttatacactgagcgcggtcacctccggtgtgaaggatgtgcgcgatgtgatagagaaggcgagaagcaaccgttttttctctcaggccagccccatcctgttcattgatgaaatccaccggttcagcaagtcccagcaggattccctgttgggggcggtggagacgggagtggtgaccctgataggcgccaccaccgagaatccctcgttcgaggtgatccggcccttgctctcccgctgccagctgtatgtgctgaaatcattggagaaggaggatttgctggaactgctgcataatgccatcgcaaaggacgtgatactgaaagaaaagaagatagagctgaaggagacggatgccatgctccgcttttcgggaggtgatgcccgcaagctgctgaacatactggagctggtggtggaggcggatgcggatgccggccccgtggtgattacggatgagaaggtgaccgagcgtttgcagcagaatccgttggcgtatgacaaggacggggagatgcattatgatatcatttccgcctttatcaagtccatccgcggaagtgatccggacggggcgctctactggctggcgcgtatggtggaggccggagaggacccggctttcatagcccgcagactggtcatttcggcagccgaggatatcggtctggccaatcccaacgcattgctcctggcgaacgccgcttttgatgccgtgatgaagataggatggcctgaggggcgtatcccgctggcggaagctacggtgtatctggccaccagccccaagagcaactcggcatacgagggaatcaacagtgccctggaactggtgcggcagacgggcaacctgcctgttcccttgcatctgcgcaacgcacccaccaagctgatgaaacagttgggctatggcaaggattacaagtatgcacatgcctatcagggcaatttcgtgcagcagcagttcctgccggacgaggtgaaggacagccgcatctggcatccgcagaacaatgcacaggaagcgaagataaaggaacggatgcagagcctctggggggaacggttcaaggaatgaaaatgaattgcattgatcctgtgctataaaattaaaaattggaacgcaaatgacataaatccaaccttccggccggtttatatccatgctgtgcagctgttaatttgcgtcattcgcgttccaatctaaccgaataaatgaacaaaatatgaaatttaacttttgagcatatgaaaatagtagttttagacggttacggattgaatcccggtgatttgtcatgggaggagatgcgggcgttgggcgagctgacggtgtacgaccgcacagcccctgccgagttattggagcgttctgccggagcggaagtgctgattacaaataaaacggtgattacggcggaggatatggccgctctgcctgccttgaaatacatcggcgtgctggctacgggatataatattgtggacatccaggctgcgaaagcgcggggcatcattgtcaccaacatacctgcctacagcaccgcttccgttgcccagatggtctttgcgcatatactgaacatcacccagcgtgtaggccattatgcctatgccaaccgtcacgggcgttgggcgaacaatcccgacttctgctactgggataccgacctggtggagctggacgggaagaaactgggaatcatcggcttgggaaacaccggacaggcgacggcgcgcatcgctgccgctttcggaatgcaggtatgcgcctatacttccaagccgcagtcacaacttcccggaggaatccggaaaatggagctggatgagctgttccgcgaatgtgacgtggtgagcctgcactgcccccttacacccgataccaaagagctggtcaatgccgcccgcctggcccttatgaaaccgacggccattctgataaataccggccgcggtcccttggtgaacgagaaagacctggccgacgcactgaacaagggtgtgatagcggctgccggactggacgtgctttcttccgagcctccccaatataccaaccccctgctgacggcgaagaactgcttcattacaccgcatatcgcctgggccacgaaagaagcccgtgtccggctgatgcggattgcggtggggaacttgaaaggattcatcaagggtgagattgtaaacaatgtggcggaatgagaacaaaggaaaaagacggaaagaaaagaaggaggtaagaaaaatggaagaagacaagaatacgttggatttgcatacggaagttagggaagaggacagggtggcaaaggccgttgccttgttcaaggaaggatataactgctcccagtccgtagtgacggcttttgccgatctgtatggtttcacccgtgaacaggccctgcacatgtccgcctctttcggcggcggcatagggcggatgcgtgagacctgcggtgctgcttgcggcatgttcctgctggccgggctggagaagtgcgccatcgaggggaaagaccgtgagagcaaggcggcgaattacgctctggtgcaggaactggccgaagaattcaagaagcggaacggcgccctgcggtgtgccgatttgctgggattgtccggaaaagagccggtagtatccacaccggaagcaaggacggaacggtattacgccaagcgtccttgtgcaagaatggtggaggaagcggcccggatttggagcgaacacctcgaaaaacaaaaaaaataggttgaaaaatcgctttttcttatagaaatacaaactttttcgatgcaaaagtgttgaataacataattttgtgtatctttgcaagcgataagaaacacaaacattcacatcggaatgtgtgggtgcggttaacgtttaactaaaagcaaattgaaaatgttgaaagaaaaagcaggtgctttggccggacaaatctgggaagcattgaatggaactgaaggtttgacacaaaaacaaatcaagaaagcaaccaaactgaaagctgacaaggatttcttcctggggctgggctggctgctgagagaagataaggtcgttacttctgaagtggaaggcgagatctttgtaaaattggtgtaagaagaagattttaaactcataaaaaaatgcgttggcacatcgtttggtatgttgtcaacgcattttttttgtatatttgttgaagtctgagatatctataaaagaaatgaaaaataagagatttgcaaccggcaaaattgtagtattcaggcaaaaaagctacttttgtattgttgtttgagaatgtaaacaaaattttgatgatacagaaaataacgattgaaggatacaaatcaataaaggaacaaactgtagagctgtttcccataaatatattgataggtgggaatggaataggaaagagcaatttcatttctgcctttactcttatacataacctgtacgagcggaatcttcagaattatgttctcaccaaaggcggctccgacagtttgttgtatatgggaaaaaaagaaactgatcatttgtcctttgacttgttttttgcggaacgcggtaaggatgctcataatcgttttattgtaaatatgaaagaggctcaggattctttatttattgagcgtattgatacggcttatcacaatggggtatcctggcacaaacaactgcacgaggtcaacaagcaggaatcttcatttaagaacgaccataccggacaggcattttatgtaaacagcttcttacgcgaatttgaggtgtatcatttccatgatacgggagaccgttcccccatgaaaggaaaatgtaatatggatgataatgtcagcttgaagaacaatggggctaacattgccgcattcttatattatctgaaagaaaagcatccaaaacatttcacacgtatagaaaaggcggtagcttccgtatctcctttttttgagggattctgtttaatgcccaaccgcttgaacgaacagctgatccagctggagtggaagcagaagggaactgttgatacgtattttaatgcgtaccagttatcagacggaacactgcgttttatctgtctggcaacgttgttgcttcagccggatctgccaaagacggtcatcattgacgagccggaactcggactacatccggtagcggtcaacaaactggctgctttgatcaaaaaagcttccagagaagctcagataattatctccactcaatctgtcaatttggtggataactttgaaccggaagatatcattgttgtggatcgtaaagacaacgcgactgttttcaaccggcttgattctgagaatttagcgcattggctggaagattacagcttgggagaaatatgggagaagaatgtcattggcgggcagcctttaaattgagtgggaatgaaaagagtagtgtttatagttgaaggcgatacggaagtgagttttattcagaagcgtgtaattccctatttgtattcgaaaggatttactaatcctatgaatgcccagaaaatcttaacgaacagaaaattgaataaaaaaggtgggaatgtgggttttgaatatctgaagaatgacgtttcacgggtggctgcgacaaaaaacgtgttaatcacaaccttgcttgactttttcagacttcctacagattttcccggctataccacagacagtttgagactgccggatatggaacaggggataaaagaaaaggtaacggaatttatggatgcttcctgttttctgccttatatccaacggcatgagattgaatccctgatgtataccagtatggacggtttcaatgttgtggtggatgatcaggaaagcttggatgaattgcagcggataatagattcatatcctacccccgaagatataaacggaggggcggataccgctccttccaaacgattgatgaggatattcccgtatgagaagactgctgacggggagatgattcttgaggcgctggatatagatgatattcgaggcaaatgtcctcgttttaataaatggatggaaaaattggaggaaggacttaagaacggccacttttaagaatgaatattgttggcaaatcttctggttttgatttcagatggtttgtattattcctgcaaaattcatccgtatatgagcgagtttttgtatatttgcgcgaaatttaagtgacgaagatgaagaatatccgtaatttttgcattatagcacatatagaccacgggaaatcgaccttggccgaccgtttgttggagtttacaaaaaccatccaggtaaccgaagggcagatgcttgacgatatggacctggaaaaggagagaggtattacaatcaagagccatgccatccagatggagtacgagtatgggggagagaagtatgtactgaatctgattgacactccgggacacgtggacttttcatacgaggtatcccgttccatagccgcctgtgaaggggcgctgctcattgtggacgcttcgcagggagtgcaggcgcagactatctcgaatctgtacatggcgttggagcatgacctggaaatcattcccgtgctgaacaaatgtgatatggcgagtgccatgcccgatgaggtggaagatgaaatcatcgacctgctgggctgcaaacatgaggatattatccgtgcctccggcaagaccggaatgggtgtggaggagatattgaaggcggtggtggaacgtatcccgcacccgacgggagacgaagaggcgccgctacaggctttgattttcgactcggtattcaattctttccgtggaatcatcgcgtattttaaaatagagaacggtgtgatccgcaaaggggacaaggtaaaattcttcaataccggcaaggagtatgatgcagatgagatcggtgtgctgaaaatggatatgattccccgtgcggaactgcgcacaggagatgtggggtatatcatttcgggcatcaagacctcgcgcgaggtgaaggtgggggataccatcactcacatcgcccgtccgtgtgaaaaggcgattgccggattcgaggaagtgaagccgatggtgtttgccggggtttatcctatcgaggcggaagattacgagaacctccgcgcttcgctggagaaacttcagctgaatgatgcctcgctgactttccagccggagtcttcactggctctgggcttcggattccgttgcggttttctgggattgcttcacatggagattgttcaggaacgtctggaccgcgagtttgatatgaatgtgattacgaccgtgcccaacgtgtcgtacatggtgtatgacaagcagggacatgccaacgaggtgcataatcccggcggtatgcccgatccgacgctgattgaccacatcgaggaacctttcattgatgccacgatcattaccgccaccgattacatcggccctatcatgacactgtgtctgggcaagcgcggcgaactggtgcggcagaattatgtgtcgggcaaccgggtggagattcactacaagatgccgctgggtgaaatcgtgattgacttttatgacaagctgaagagtatctcgaaaggatatgcttcctttgactaccatcagtcgggtttccgcccttccaaactggtgaagctggatatcttgttgaacggtgagccggtggatgcgctttctaccctgacacatgtggacaatgcctataacctgggcaagcgtatgtgcgagaaactgaaagagctgattccgcgccagcagtttgatattgccattcaggcagctatcggggcgaagattatctcaagggaaaccatcaaggcggtgcgcaaggatgtgaccgcgaagtgttatggcggtgacgtgagccgtaagcgtaaattgttggaaaaacaaaaaagaggtaagaaacgaatgaaacagatcggtaatgtggaagtaccgcaaaaggcgttcctggccgttctgaagctggattaattcaagaataaacaagctctggggagcaaacaataagcgggctctttctgttagttgaaattaaaaagtcaataacaggaagggcttgtgttttgatggcaatttatcacaaactcttaaattcaattgatatggaaaaactgaaaattctgaacttgaacttttccttccagcgggcggcgcactatcatattaatggagggatgttgctgatgggggtagtcttgctggctatgttcctggccaattctccgtggggggatatttatgcctccttttggaattacgaggtgcatcttcagataggagaatttaatttcttcagtcataacgggcatcacatgaccttgatgacttttatcaacgatgctttgatggctgtctttttcttcagtgtggggctggagataaagcgtgagatactggtgggcgagttgtccagtttccggcaggcgcttttgcccatcgtggcggcgtgcggcggtatgctggttccggtgctgatctattatttcatgacggcgggaactccggcccaaagtggtctggccataccgatggctacggatatcgccttttcgctgggagtgctcagcctgttcggcaagcgggttccgctgagcttgaaagtctttctgaccgctttcgctgtggtcgatgatatcggcggcattctggtcatcgcccttttttacacctctcatctgtcagtgaactacctgattgcttcggcgggtatcctgctgatactttgcggcgggaatttcttccgggtgcacaaccgttggttttatattttctggggagtgattatgtggtatctgtttttgcagagcggcatccacgctaccattgcgggagttgtcgcagccttcacggttcccgccactcctcattacaagataggtaagtacattaaccgcatccgcgagaacattgctgtctttcctgccagtgacaaggaaagtgttgtgttaagcaagatgcagatcaatgtgctgaaaagcatcgagtcttcctcggaccgtgtcatctctcccttgcagtcattggaagacagtctgcatggaatggtgaattatattattcttcccttgttcgcctttgccaatgcgggtgtctcgctcacggcggatcatggcggtctggaagtggggatggctacctgggcggtgctggcgggattgctggcgggtaagtttgccggcatttatttctttacctggctggtgataaagatggggttcgccggactgctgaaaggcatgacctgggtgaacctgacaggtatctgtcttttgggaggtatcggttttacggtttctttgttcatagccaacctctctttcggggattcgccggtgttgctgacgcaggcaaagatgggggtcatactgggaacggtgctggcgggtgtgctggcgtatctggtcttgcagttcgccctgcctaaacagcctgcacaggaataaaattacagatagggcagtacggcggtgaaacggctgcccttgttcacctcggattgcacatcgatgtgtccgttcattttttctacaatgaccttgctgatggcgagtcccagccctacaccctgtacaaactcattccgcttgtagaaccgctcgaatatcatttgtaattcttctttagggattcccgcaccggtatcttctacgaagatatggatttcctttttctctttgtcgcagaaataacccagtttgatgtgtccttgggaggtgaacttcttggcgtttcccaaaaagttggtgatgacttgggtgaggcgcatacggtctatgtgtatggtcacatcctcgtcgggaaattctttgatgaattccactggagggagaataattacctgatgggtctgatagaccgtttcggcgaaatgatgcgcgctgcaatcctcgcaatgaaaggacatattgccggattctatacgggatagttccagcacatcattgaccagcttcaacaagagtctggtattgttgtctatgatggaggcaaactcttttttctcttcttccgagatgtttttctcggtagtgagcaggttggagaatcctacgatggcattaagcggagtacggatttcatggctcatgttggccaggaaggattgtttcagttccgcctgttccgccagtttgcgggcgcgtatcagttcttcttccttgtctttgatctcctgaatgtttaccagaagtccggtgatgataggattttgttcattattctgcaacacgctgtatctgaattcccaccattggtaaccggtgtcgttgaattggcaacggtattgggctgttcttcgttgccggtatagtatgttggatacgttttttctgaaccgggcttgttcgtcggggtgtacatagtgggttatttcctctattcccaacaggttttgggaacggttggtcagttcgcagaaagcttggtcgagcacggcggtctttccgtcgaaacaccaggcgtaggtatttcctccctccagtgcaagcgttaatgcttcgtgttcgaacctgaggttgcgcaaggcttcttttttgcgtcctttttccagtgtatagatataaataaggtaggctatccccaaaaggagtgtgaagaccaggaggctttcaagaatcaggatgggggttgcgtatttttccctccacggcctgtacatgatggtatattccggtggaatgctttcaagggggatctggtatctcttcatggcctgccagttgaccaggtactgtttggcgatttgttttaccgccgggacgggtatctttccttgcagtctttctttgatgccggcggtcatgtcgcttagctgtgtttcgatgggggcgaaataacctcccagcatgtattcctttatcccgaatccttcgttgatggtttcgaatccgggattgtcgaacaggctgccgatgcgcagggtggtatagtcccgtttggtatacaggaacagggagtattggaagactccgctggacagccacatcaggtcgcgggcagctacggaatcactggacaggcggactacgacggtggagtccaattggttgtattcgttcagcttttcgtacagggattcatattcggtatcatctttgtcactgatggggatattcagcttgtcgggccgggcctcttgtcttttccattggtggagggtgatttccgatcctttgcattgttcgctcaggtctttccagataaggcggtcaagcacggtccgcccgttcaggatgtggatgcggactttgcccatgatgcgttctatcatccggcaggtggtgaggtaatcgggtttgtctatgtagcccgtaatgttgggatattgtgccagcaactcttggttgggataattcactccgctgaatacgacgggaacctgcctgacatacgggtttccgcaagccatgacagagtaggttgcctgatcatcgagcacggcaatcaaatctcctccccatgagcggatggaatctgcaaactcggaaatccgtcgctcttcttctacggattcgtatttctcgcaatccagataaaaggtgcgcagctggaagtctatttgctggtctttcagtcctttgacaaacagtttgtttacaatgccggcaccgctgtacccttcctggtaggaatggataagggctattttatatttttgtgcataaagcggactccctataagaagggctgtcataaaaatgaaaaaggccttatgcttcatgtcaaacgtgattattaagtgaactgggggacaaagataggaatgtttctttaattccggctatgatttacaggaaattattggaagagagagggaaataaccatcccggttggtggaaaacagcaattccggcttcttgaaaaacatgcttcttgcttttcaaggaaccggaattgcctgtgataaaaaggaatgggccaacccgtcagcgggggttatttgtgttgctccggagacggggtactttgagaggccggtccggcggcagcgtttgtagaggcgcttgaagcggaacttttagccgcgccggaaaccggagccgctgtctgtgccgttgtggcctgttcttcccagtggaacggttcgaactgtgtatccttgtctacccatgacggtttgcgcgatgcatagataatgaacggagctgcgactaccacgacgcagccgataatcaaaacggcaaaccatacggtgttgctgcctaccgcaatctggctgggcggaatgaagctgagcacgaatgccagcagcgaaccgcagaaacccagaccgccgatgagccacatcagtccgttgcctttgctgccgatgcggaacgggcgcggggcctttttcatattgtaacgcagatagatggcgccgctgaacatcagcagatacatgatgaggtaaagcaatacggtgagctgtgacaggatttggtagaaactctgtacggaaggcatcacaacgaacagcaggctgagcaaggttacggcaaggccttggatcagcagaatgtttttctgtacgccgttggcgttggtcttctggaagaagggaggcagataacctgctttgcccactgcgaagatacctttggacggacctgccacccaggtcaacacgcctgccagcacaccgaatgccaaagccacggcgatgataggcgacaaccacgaagcatggacatacttgaagtaattatcaaagcctaccagcagactctgagtcaggttgatgtccttttcgggaatgatgatccccagtgcgaaggtgcctagcacgaagatgatcacggtgatagccgcaccgatgaatacggctttcggatagttcttggcaggattttccatgtcttttacatggataccgcccatttccataccggcatagaacaggaagatgctggaagccagtaccaggttgtcgaagttgctgaaatcggggaagaagttgccgtcaaagttcatctggctctgtccgccggaagcaaggtaaatcaccgccagcaccatcagcaggccggcaggaatgatcgtacctaccataccgcctactttggccactttgcctacccagcccatgcctttcagcgaaatgaaggtggccagccagtagataatcaagaccaccgccagtgagtaatagcggttggatgccaaggccatatcatgggtgtcactcatgccgataaatgccagtgccacggctccgaaagtcaggacggtgggataccagatggtgctttccacccattgcaggaagatggcgaggaagccgaatttctttccgtaggcttcacccacccatcggaacacaccgccttgcttgtcctggaacatggccgccagttccgccgctaccaacgaggtaggtatcaggaagacgatggccgcgaataaataataaaatgccgaactcagtccgtattcggcttcagcaggcagcccgcgcagggatactaccgcagtcacgttcataatagcgagggtaaatacccctagcttgactgatttactaatgtttgccataaagtttaggttttaaaaaatatatgttttttgtttacggagtttataacaactccctggaaatgatgtttatccgtttaggtttattaacccggaaggtatccggaatgaaacaatcgcacccggaagggtgtttctagaaaaaacaatataatcagtatcgtttatgaaaacagctttctcctcattcatctattcccgcagggggatttacgggatcttgcatatactcatcctgttgatgtccctttttctggttataagtatctcgatagatacttttcataacatccctttcctgaatcaaggttcttatctgaagattcagttctggatatgtatgtttttcctgttcgatttcctgctggagtttttcctctcgaaagaaaaaggaagatacttcaccagccattttattttcctgctggtatctataccttatttaaatatcattgatttctatcacatcactttctcgcccgaaatcagttatttcctgcgctttatccctttgctgaggggagggtatgcgctggctatcgtggtgggctggctgtcgggcagcaaggcgtccgggctgtttacctcgtacatcaccatgctgatggccaccgtgtattttgccagccttatcttctttgtgctggaacataaggtgaaccctatggtgacggactactggagtgcgctgtggtgggcgtttatggatgtcactaccgtagggagcaatatttatgccgtcactcctacggggaaaatactgtcggtggtgctggccgccctgggaatgatgatgttccccattttcacggtatacgtcaccagtctggtgcagcaggccaacaagcggaaggaggaatattatcaatcgcaacaatcggagccggcggatactaaataatagcttgaacttcgtcaaaaataagaaaaaagtcttatcttcgtagccaataacaaattgctaacctaaataaacaacaagatgaaattattggctctgtgtgcggcggggataggcttgatgctgtgtgcctcgtgtacaaacaacaaacatttgatcagtgatgaggctgaacgtgccgctgttcagcaggattttgaggcacggcgtgatacgctggcccaaggtgacctcttccaggtattcgaacaacccatgagcgatgagcagaaggaggcgatgactttcctttacgcctatatgcctttggcggatatagcggatcatcccggtgaattctatctggaaaacgtggattacgctttcaaggcgcgtgaggagatgccgtggggaaaagtggttcccgaacgcgagttccgccactttgtactgcccatccgcgtaaacaacgagaatctggacgacagccgtaaggtattctacgaggaactgaaggacagagtgaaaaacctttctttatatgatgccgtgctggaagtgaaccactggtgtcatgagaaggtgatttatactccctctgatgcccgtaccagtagtccgctggcttccgtaaagacagcctacggacgttgcggcgaggaatctacgttcacggtagccgccttgcgttcggtaggcatccctgcccgccaggtatatacgccgcgttgggcacataccgatgataatcatgcctgggtggaagcctgggtggatggcaaatggtacttcctgggtgcttgcgaacccgaaccggtactgaatctgggttggttcaacgctcccgcttcacggggtatgctgatgcacaccaaggtgttcggacgttataacggaccggaagaagtgatgtaccgcactccccggtatacggaaatcaatgtgattgacaactatgcccctacggcaaaagccgatgtggccatcgtggatgcggatggcaaaccggtggctgatgccaaagtggaattcaaggtgtataactatgccgaattttataccgtagcttccaaacagacggatgcggacggcaagacgttcctgacagccggaaaaggggatatgctggtatgggcttccaaagatggaaaattcggttactccaaactgtctttcggaaaagacaatgccttgaccgtgaaactggacaagacggccggcgaggcttatacactggatatggatatcattcctccggtggaaggcgccaatatgcccgaagtgactcccgaacaacgtgcggagaacaatcgccgcatggccttggaggactctatccgcaatgcctacgtggctacgttcatgacggatgaatcggcccgtcatttcgctaaagagtatcagttggatgaggatgttgttgccaaattgctggtggcatcacgtggtaaccacgaaaccatccgtgactttatggcccgtctccgttcggacaagtcaaagaagggcggcattgacctgcttcagcagatttccgccaaagaccttcgcgatgtaagttccgaagtgttgatagaccacatgatgaattcacatctgtgcgccaatgccgattatttccgcagatttgtgcgtaatccgcgtgtgagcaacgaaatgattactccgtacaaaggattctttgagaaagcagtgcccgaacaggagcgtgaggcttaccttgccgatccgatgaagctggttgcatgggttgccgaaaatatccgtgtggacaaggattgcaatctgggcggttctccgattactccggaaggggtgtggaaggcccgtacagccgatgcgcacagccgtgatatcttctttgtttccatggcacgcagcatgggtattcctgcacgtatagacgaagtgaccggaaaagtgcagttgatgggtgatgaaggtactgttgatgtgaactttgaggcgatggaacaggccagtgcgcctaccggcaagtttattgccagatatacgccgatcaagtctttggccgacccgaagtattattctcatttctctatttccagactgactcctgccggaaccttgaaattgctgaattatgatgaaggcgatattgatatgggtggcggtgctacttgggctaatctgttgaagaacggaacggcactggatgccggcaattatgtgatggtgaccggtactcgtctggccaacggcggcgtattgtcccagctgactttctttaccatcaagccgggggaaacgactacggtggacttggtgatgcgtgaaagtaaggatgatattcaggtgatcggtaacttcaactcggaatctacttataaaccgatagatagcgatgaactgaagtctattcttgccactacaggacgtggttactacattgtagccgtactgggtgccggacaagaacctacgaaccatgccttgcgtgatattgcggcattgggtaaggagtttgatgaatggggcagaggaatcgtgctgttgttccccaacgaggagcagtacaagaagttccgcccgcaggaattccccggattaccggctaccattacttacggtattgatgtggacggttccatccagaaacagattgcagaaggcatgaagttgtctaacaagactatcctgcctatgtttatcattggggatacctttaaccgggtggtattcgtgtcacaaggatataccatcggactgggtgagcagctgatgaaggtgatacataagctgtaggattcagtataaacaaaaagtaacgcggatattcaagtttgcaaactgaatatccgcgttaaatatattgatagcgtttatgcttacctgtttacttgtcatcatccaagtcatcgtcccagtcatcctctttctttgatttcttggggttgaggcttttgtttttcttttccagtgctttgtcgttttcgtctttcattgccagttcggacaaggcggcttttactttgtcaggatcggtaacgtctttcagatactcttctatctttacagtacctcccatggatacttttgagttacgataaatcatgccgctgtctacgctgctacgtccggagaaatgaaattccgaagttccggtttcttcggcaatcttacggatattaccggcattcacaccgcatcccggcatgatgatgatccgtccgtcggcctgttccaccaattctttcagaagagggattcccttttcggcggtagcttcctgtccggaagtaagaacccggtctatacccagtccgataatctgttccaaggcctctttgggattgctgcacatatcaaaagcacggtggaaggtgacactcatctcgcctaccgcattcatcagtttctgcatcagaggcacatcgacatagccttctgcggtaagacagccgaataccacaccgtccgcacccagctggcgtgccactttaatatcatgcagcatgatttcttgttcaataggagaatataggaaatctccgccacggggacggataatgacatgcagttttgtttggttcaataattggcgtgccatacggatttcaccaaaagacggggttgttccgccttccggaatacctgcacatagttctacacgataagcaccggcttgttgtgccttcacagcactttccacggagttggcgcaaatctcgatttttgatttgttactcataaagttatttaatagttaattcaattccataatcaacgtcatcgggcgctttgggctgttccagcatttctctttcaaatattccgccaagggaactccaatggtttctctgcgtgagttcgtcattggtccggttctttacggatgactttgttcttcataatatgatgaatttgtcagtgcaaagataggcataatgtaagagtgtgagaaattttagcggaaaaaatttttaattaaaaagccggtactcctctcggagtgagagaaataccggttttcctatgggaacgaaatggattattgcacgtggatgcgatggccattgaatacgttcatgcccagtttgttcataatatgcttgatggcaagctgtgctttcacggagttgccggcgtcatccagaggaggcgcgaaggctgcaatgcccatgacacccggcattacgcccatgacaccgcctcctacgcctgtcttggcaggaattcccgaagtgtaaagccagtcgcctgtgtgctgatagaaacctacggtagctatcatggaggtgattttcggggagagggctttgtcgaacacttgcttgttggtgttcgggttcaatccttcgttggcgatggtggctccacagatggacaactgttctgcagtgatgcccatggaacactggcgggtgtagaggtcgagcgacatatcggggtcatcgtagatacggttataatttttcaatagccaggcgatggaacggttgttgaaatttgtcgccgactctgaccggtacagttcgtcgatcagttgcggggtacttccgcatagttcggtcatattgtctacgatggctttccacttggcatcgctgtttcctacgggttgcaccatactgttggccgagatggcgccggcgtttaccaatggggtggacggatggtcgttttccaacaagatggccatgatggagttgaacggcagtccggtagcatcggcgccaatcatttcgagcaccttgggagcaccgtattggcggagtaccaggatggcggtcagcaccttggaaacggactcgataccgaaacggtactgagagtcacccagttggatgatttctccgttcatcagacagatactgatcccgaacagtttgggatcaatatttgccagataagggatatagtcggcgttcttaccgtctgtattgtccttgtacagattgtaagcctcctgggcaacatcctttatttgctggatagttatagttctttccataaattaatttgattgaagtaaccatctaccttaacggcggatggttgcattattgttatctatgcttattttttagcggcgttgctatgggcattgtgagtgaacacagtaccttttacagcgatattcttgtcttgggcgatgcgggtaggagtgggatattccagtttctcgaactcgcagatggcattcttgatgtcgttcaacaacatatccgccatgtcacggctgaatccctgacgtaccacaacacgcataactacgtaattctggatattttccggcaaggtgtaggcaggaaccatccagccgctttgctgcaatttagcctgcaaatcgtacagagtccatttggcattctttgcatattcgggtttcatgtaccagatgaacaaaggatttactacgtcatcgctgtaatttacgaacggagccatcttggctatttcgctgtggatgtacttggtgatttccatggaattgtattggatggctttgtatccttggaatcccagacggataaattggtagtactgtcccagaatctgtgcggcgggacggctgaagttcaaaccaacctgtgtgatgttcgcacccagataattgacactgaacgacatggcatccggaaggtatttcttgtctttccatactacccatcccagtcccggataaaccagtccgaacttgtggccggaagtgctgatggagagaacccatttcaagcggaagtcccattttgtgtcgggattgaggaacggcaggatgaaaccgccggttgcagcatctacatggataggaatatcatagccggttttggcgttgtaggcatccagtgctttgtccaacgcttccacgtcatcgttcaaacctgtccatgtcacaccttggatggggacgatgcagatggtgttctcgtcacacatcttcagtgcttcttcggggtccagagtggttttgtccaaggtgagaggtacttggcgcatttcaatttgccaaagttgggcgaacttttcccaaacaacctgaaaaccgcttgaaatgacaaagttaggcttgtcagtcggtttcccctgagctttacgtttgtctttccagcgtaaccaggcggctactcctcccagcatacaagcctcgctggagccgatagccagtgctccggttttccattttgcctgttcgggcgaattccacaaattagccatgatattgatacatttggcattcatcactgcgatacgaggatattctgtttcatcaatgtagttgatgctgatggcttcgttcatcagtttggtggcatagtcgtccatgtaggtggtaacgaaagtggccaggttaaggcgtggctgggtttgggcgaatgtttcgtcttttaccatttgataagcaatctgtggggtggtaggttccatagggatggtatctaccggggcaggctgtagcatttcgtttgaaccaaacacggctgtctttgcgtcaccgtctctcaaatcacaattacattctttcattttacttaaagtttagattagtaatacaatggaaaacatgggagtttcccgcgtttttctccctcaacaggaggtttggagaaaagtttcttgattttatgttttttaatttatgggggataatgtgtcatgcggaacatagcgcagccaattggcatagtagcatatgggcacatgattgcattgaccaattataaaccggctttgaaccaattcttttacactttgtttctatcacaatctaaaccgatttcattatgaaagtacaaacagggcaggggaccattcccctcattacgttagtaggtatattttccatctcggcactcaatgcattgccgggactggcggtgtcgcccattttgggagatttgaataaaatatttccctctgctacagatctggagatccagatgttgtcttcgttgccatcacttcttatcataccctttatcttgttatcaggtaaattgacagagaaagtgaacaaccttttgttgttgcagatagggctggctcttttcggggcgagtggtattctttatctgctttctgataaaatgtggcagttgatagccgtcagcgccatgttggggatggggtcgggattgattgttccgctttctaccggattgatatcccgttattttgtgggaagttaccgtacaaagcaatttggttacagttctgccatcaccaatatcacgctggtgcttgccactacactgacaggatatctggcagaagtgaactggcatttgccgtttttggtctatctgtttccttttgtgtccgttttccttactcgttatctgaaaaaagatctctccaattatcattcctctgatgatattccagccgatactgccagggaaatgggtaagcggggaattaatgtcaaggctttggtcaagctgatggctttttacggattggctacttatctggtgattattattagtttcaatctgcctttcctgatggaagaatatggactgtccagtggtagggcaggcatcttgatatctttgttttttctcgctattatggcaccgggttttgtcctgaataagatagtgcaggtcttgggccgtcgtatctatatggtttgtttgttgatgatagcctgtggaatggggattattctgcttagtcgttccgaaatactgattgctttgggatgtattctgaacgggctttcatacggtattatccaaccgttgatttatgataagacttctgatgtggcggttcctcacaaagtgacgttggcacttgcttttgtcatggcgatgaattatgtggccatactgctttgtccgtttattgtggatgcttttcagaatctgttccattctcattcgcaaacctttgccttctggcttaatctgatggtagccttgatggggatgtttattgtgatgaagcaggaaaaactgagtttataagaaaaatacccacgtaataacataacagcatgaagtatgaatagacaagttgaagcaaaccttagcatggttgtctccaaagcgttgggaggccttaatatgaacgcactgaagtatcttttacctttgtggatagctcctgtgacaggggttactttccgattggtatttggggccgccgctttttggcttattgatatattttgcaagcccgaaaactccactatccgtcagaaatggcagctctttattttaggggctttaggtatttatggatatatgtttttttatttgttgggtatcagtaagactactccggtttccagttctatttttgtcagtttggagcctatatgggtattcattatctctgtattgttttataaggaaaaagtaacctggatgaaagtgcttggcattggaatgggattgggaggagctgttctatgcatattcacacaacctagtgacgatcttgcctccaatgctccgttaggtaatttgatgtgtttggccagttcattggtttatgccgtctatcttgttttcagtaaccgtctgttaaaaggagtgggagatatgacgatgttaaaatatacttttttaggggcggctgttatggctgttgttgtcaatacgatttatggttttgatgctcctatactgaaaatgtcacttttctctacgcctatgttggtcttgctttttgttttggtatttcctaccaccattagttatttattacttcctctcgggctgaaatatctgaaaacgacattagtagccatttacgggtatttaatattgattgttgctacggtgacttcttttgttttggggcaggatcgcttctcatggacacagttggcggcgattgttcttatttgtgccagtgtttatctggtggaagtagccgagagcaataaacagattacgtcgaaattaaaataagacagcagataaggagtgtcaaaatgaaaacgatagtgctgccggggcttttacatacttccttgagtgtgaactttgtcgacaagtgaaaaggagaacaaagagaaaagaatacaattttacgttgtatgtgagtgtaaggaatcaattttatttgtagctttgcacccaatttaaaaacaagagtgttatacctatgctacaattagatgcaatatacaaagcggctcatgtcctgaaagaggttgtccgtcgcactgatttgatttatgctcctcagataaatcctgagagtacagtttatctgaagcccgaaaacctgcaactcacaggatcgtttaaagtgcgtggtgcttattacaagatttcccaattgtccgatgaagaaaaggcgagaggcgtgatagcctgttctgccggtaatcatgcgcaaggggtggcattggctgccactaagtgcggtatcaagtcgttgatttgtcttccggaaggagcgcctatatctaaagttgaggctacgaagcattatggggcggaagtttgtttggttccgggagtctatgatgatgcttatcagaaagccctgcaattgcgtgatgaaaagggatatacttttgttcatccctttgatgacgagaacgtgatagccggacaaggtactatcggtttggaattattggaggaaatgccggatgtggaggtagtcattgttcccattggtgggggaggactgatttcgggagtggcttatgcgttgaaggctttgaaaccatctgtcaaggtatatggcgtacaggcgttgggtgcggccagtatggcaaattctattcttcattcgcgtattgagcgtcttcactctgtttccacttttgccgatggaatcgcggtgaaagagccgggaacaaatacttttgacttggtaaatcagtatgtggacggagttgtaactgtgactgaggacgagattgccgcagctattctggcattgatagaacgccagcggattgttgcagagggggcgggagctgtgtctgttgctgcagccatgttcaataaagtaccggtaaagggtaagaaagctgtctgcctggtgtccggaggcaatattgatgtgacgatattgagccgtgtcatcagtcgcggcatggcgaagtcgggacgtacctatgcagtaactttggacttgatagacaagccggggcagctgttgggagtcagcaaaattgtcgcagagcagggaggaaatgtaatttctgtacatcatgagcgaaatagtgagagtgcagatgtcaccggatgtgcccttcgtgtcgttatggaaaccagaaacgaggaacatatagcatccattcgtcaaaaactgttggatgcaggctatgtgataatgaaataaattatataccttacaagtagaaaggaggaaaattaaatatttcttccttttcttgcttctaattttaatttctccacacaaaaaatcgatttttatagtgaaaatatcattttatacttcttagaatccaattaaagtcgtacatttgtcgcagttttgtaatgtagagtttgcaaaaatgaccgatataatcaaacatcgtggtattgtggaaaacattgaaggttctcacgtgcgggtgagaatcgtacaaacttctgcctgttcggcttgtagtgtgaaagggcattgcaatgcatctgaaagtaaagagaaactgattgatgtttttgacatgaaggcatcttcttaccgcataggtgaggaggtgatgatttatggtactacttccatggggatgcaagccgtattgctggcttttggtatccctttcttggtattgctgattactttatttatttccatgcgtcttacgggggggaatgagttaaggtcggcgcttgttgctttgtcagccttgctcccgtattaccttattatatatgtatgcaggaataagttgagcaagaagttttcatttacgcttgaaccaataaaaaataattaataaataactaactaaaatttatggatttaattctggttgcagtaatttcgttgggagcgattggcttgattgccgcggtaatcttgtatgccgcttctaagaagtttgctgtgtatgaagatccgcggattgccaaggtgagcgaagtgcttcctcaggcgaattgcggcggatgtggttatcccggttgctctggttttgccggtgcctgcgtgaaggctgccgatgccggttcgctggagggtaagttatgtccggttggtggtgctccggtaatggagaaagtagctgccattttgggattggaagccgttgctgctgaaccgaaagttgcggtggtaagatgtaacggtagttgtgaaaatcgccctcgtactgctctgtacgacggagctaaatcgtgtgccatcgctcatgccacttcaggtggtgagacgggttgtacattcggttgtctgggttgtggtgattgtgtggaagcgtgtcagtttgatgctattcacatgaatcctgaaaccggtcttccggaagtggacgaagaaaaatgtacagcttgtggggcttgcagcaaagcttgtccgcgtaagatcattgaaattcgtccgaaaggaaagaacaaccgccgcgtagtggtgatgtgtgtgaacaaggataagggagctgttgccaacaaagcttgcaaggctagttgtattggttgtggaaagtgtgtgaaagtgtgtccgttcgaagccattacgttggaaaataatttggcatacattgatccggctaagtgtaagtcttgccgtaaatgcgaatcggaatgtccgaaaggggctatccaagctatcaatttcccgccacgtaaaccgaaagtagaagtgccggctggtgaggctgctgcaaaacctgctgtaaaagtagaggcttcaaaggtggaaactccgaaagcggaagcggtgaaagctgaggctccgaaaacggaagcataatcaaaattcaaagtaagtaaaaattaaaaagatataacagtgaagacatttagaattggtggagtacatccagcagaaaataaattgtcagcaggcaaagccattgaaacacttgcacttcctaagcaagcggtatttcctttgtcacagcatatcggtgctcctgctactgccatcgtgaaaaaaggcgatgtggtgaaggtaggtacgaagattgctgaggcgggtggctttgtttcagcagccatcttctcgtctgtatccggtaaagtgaacaaggtagacgccgtaatcgatgctagcggttaccgcaagccggctatctttatcgatgtggatggtgacgaatgggaagaatcaatagaccgcagttcgacattggtgaaagagtgtgctctcacacccgaagaaatcgttgctaaagtgaaaaatgcaggtgtagtaggtatgggcggtgcttgtttccctactcatgtgaaactttctcctcctccgggctgcaaggcggaatgtgtaattatcaatgctgtagaatgtgagccttacctcactgccgaccatcgtttgatgctggaaaaggcagacgaagtactggtaggtgtaagcatcctgatgaaagctgcaaaagtgaccaagggatatatcggtattgaaaataataaaccggatgctattaagttgatgactgaaaaggctgctcagtatcccggtatagaggtagttcctttgcaggtgaaatatccgcaaggtggtgagaaacagttgatagatgctgtgatcggtcgccaggttcctgctcctcccgctattcctatcaatgtgggtgcggtagttcagaatgtaggtactgcatttgccgtttatgaagccgttcagaaaaacaaacctttgtttgaacgtatcgtgaccgttacgggtaagtctgtcaagaacccctccaacttcctcacccgtatgggtaccccgatgagccagctgattgatgcggctggcggtttgcccgaagatacgggaaaagtgattggtggcggtccgatgatgggtaaagcactggttaatacggaagttcccatttgtaaaggtagttcgggtgtgctgattatgaatgataaggaagctgcccgtgcggaagctcagccctgtatccgctgtgccaagtgcgtcagtgtgtgtcctatgggattggagcctttcttgttggcgacactttcagctcataaggactgggagagagtagaaaaagaagatgtaatgtcgtgcatcgagtgcggttcgtgtcagtttacatgtccgtctcatcgttatttgctggactatatccgtttgggtaagggcacagtaggcggtatcatccgtgcacgtaatgctaaaaaataattcgacaaaatagtatggctaataaattaatagtatcattatcgcctcacgttcatagcggtgacagcatacagaagaatatgtatggtgtactcattgcgttgatacctgcgttgctggtgtcattttatatgttcggactgggcgccgtggtggtgaccttgacctcggttgccgcctgtgtattcttcgaatgggcgattaccaagtttattttgaagagagaacgctctaccatctgtgatggttcggctattataaccggtgtgttgctggcattcaatctgccttccaacttgccgctttggattattatcatcggtgcgttggtggcaatcggtgtgggcaagatgactttcggcggattgggttgtaatcctttcaatcccgcgctggtaggtcgtatcttcctgctgatttcttttcctgtgcagatgacttcatggccgttggttcaacaatggggaagttataccgatgctgaaaccggtgctactccgctggcattgatgaaaatggctgtaaagggtgatgcaaatgctttaggtcagttgcccgatacattaagtctgtttctgggtaataacccgggttcactaggtgaggtgagtgcattggctttattgcttggtctgggatatatgctatggaaaaagattatttcctggcatattcctgtatctattctggtgacagtatttgtatttgccgggctgatgcatttggttgatccggttgcttacgcatctccgttggctcacttgtttacaggtggtttgatgttgggagctattttcatggcaaccgactatgttacttcgcctatgactcataaaggtatgattatttacggtgtggctatcggtttcctgaccgtggttatccgtttgttcggtgcatatcccgaaggtatgtctttcgctatattcattatgaacgcattcactccgttaatcaatacttattgtaaacctaaaagattcggggaggtcgtgaagaaatgaaaaaactagaatcatctttgaaaaacatggttatcgtgctgacaggcgtaaccgtggtagccggagcattgctgggttatgtgaatgagttgacaaaggaacccattgcacaggctaatgccaaggctttgagtgatgccattgctatcgtagttccgggatttgacaataatcctgccgaagctcctgaaaccatagaattggaaggcgttacttataagatatataaagcaaccaaaggaggagaatttattggtgcagccgtagagtcttctgcaaatggttttggtggtgcgttgaatgtattggtaggtttcgataaagagggtaatattatagactattctttgttgagtcatgcagaaactccgggactgggatcaaaggcagccgattggtttaagaaaggcggcaaaggcgatattactggtatgaatccgggacagaaagcattggttgtaaataaagatggcggtcagatagatgcaatcactgcttctactatcacgacacgtgcttttctgaaagctgtgaataatgcttatgcggcatatagtggccaaaatgtggatggttccagcggtgcgacacagcaggtgtctgaaactgctgccgatgcccccaaagcagctaaggcacaatgtgagggaactcaggattgttgcggacaagcctgtgactctgctgcctgcaaagctgcttgtggtggtaaatgtgatcctgctaactgcgacaaggcggactgtaaaaaagcagaatgcccaaagcaagattgtaaaaacaaaaaataaggaaggagcagactatgaataattttaaagtattaatgaacgggattgtcaaagagaatcctacgtttgtactccttttgggtatgtgtcctacattgggaaccacttcttctgccatcaatggtatgggtatgggactggcaaccatgtttgtgttgatttgttcgaatgtggtaatttcatctatcaagaatctgattcctgatatggtgcgtattcctgcattcattgtggttattgcatcatttgtaaccttgttgcagatgattatgcaggcatatgtgccggcgctgtatgctactttgggattgtttattccgttgattgtggtaaactgtatcttgctgggacgcgccgaagcgtttgccgcaaagaacggtcctgttccttcattctttgacggattgggtatgggactaggatttacacttgcattgaccatccttggtggtgtacgtgagttccttggtacaggtaaattgtttgatatcgctattatgccggagcaatacggaatgttgattttcgttctcgcaccgggagccttcattgcattgggttacctcattgcgattgtgaataaactgaagaaagcataacccgtaaaaagtaagaaaatggaatatatattgatatttatcaccgctatatttgtgaacaacattgtgttgtcacaattcttgggtatttgtccattcctcggtgtatccaagaaagttgagacagctacgggtatgggagcggctgttgcattcgtgcttaccatcgctaccattgttacctatcttatccagaaattcgtgctcgatgctttcgggttggaatatttgcagaccattgcatttatccttgtcattgcagcattggtacagatggtggaaatcattttgaagaaggtatctcccgccctttatcaggcattaggagtctttcttccgttgattactactaactgctgtattctgggtgtggctattttggtaatccagaaagactttgatttgttgacgggggtggtttatgccttctctacagctcttggttttgctttggctatggtgttgtttgcaggtatccgtgaacaattaagtttggtgaatatacctaaaggaatgcagggaatggctatcgcattggttactgccggtctgctggcaatggcattcatgggattttcaggtgtagacaaaggcttgggtgttttgtttggaatagaataaattcacttcatcgttaaaataaaccgattcagaagtccggagcacagcttcggacttttttattagaaagaaatccattgttcttgtccgtaaattcaatttttatgcttatttttgcattagaattaatagagagattaaatggctatgaccttgattgtactcgcggccactatggggaataaatatggtggattgaaacagctggagggaataggtcctaatggcgaaacaatattagatttttccatatatgatgccgtaagagtcggatttaataagatcgtatttgtcataagcagacattttgaacaagaattcaagaaactggtatcaggcaaatacgaacatgtggtagaagtggagtatgtttatcaggatgtggaaacgattcctgaagaaaagcgtaatccgaagcgcaaagcactgtacggttcggtaagagctgttctgatgggagaagagttgattgactctccattcggtgtgataaatgccgtgaacttttaccaaagagaaagttttgaattgttatataataatctggtgatgttgggagaagctgactaccatagtttcaatatttgctacaggctgagaaatgtattggcggaaagcggaggggttacccgtggtatttgtgaagtggatgaaaagggatatctgttgtccgttacagaccgtgtaggagtagaacggataagtggaaatccgatgtatcctaatgaattacataaatgggtggctttggatgacaacagcttggtttcaatgaatatgtggggatttactccgcaggtattcggtgagatgaagaaggcgttcgataagttcatagatgagaatggaatggatatgaaagcccattattctattccggcttttatgaatgagcgtattgctgacggagtcagggtgaaagtgattgagacacctgccagatggatgggattggtatcgcatgatgacaagatacaagtcctgcttcgtatcaatgatatgatacgaaaagggatctacccgtcgaagttgttttgaacctattagaaaacgacagaatattaagtattatgaaagaaagaattttagtaacaggaggaaccggctacatcggttctcatacggtagtagagctgcaaaatagcggttacgacgtagtgattgtggacaatttgtccaactcaagcgccgatgtggtagataatatagaaaaggtttcaggaatccgtcctgcatttgaaaagttggattgcttggatcttgagggaatggataagctgtttactaaatatccgggtataaaaggtattattcattttgcggctagcaaggctgtgggtgaatcggtacaaaaaccgttgttgtattatcgcaataacttggtttcattgattaacctgttggagttaatgccgaaacatggagtagaaggtattattttttcatcatcatgtacggtgtatggtcagcccgatgttcttcctgtaacggaagaggctccgattaagaaggctgagtctccgtacggtaatacaaaacagatcaatgaagaaattattcgtgatacagttgcttcgggatcgcctatcaatgctattatgttgcgttactttaatcctattggcgcacatcccactgcattaataggtgaattacctaatggggttccacaaaatttgctaccttatgttactcagacagcgatgggtattcgtgaaaaactgagtgtgttcggggatgattatgatacaccggacggttcttgcatccgtgactatatatatgtagtggatttggcgaaggctcacgttatcgcaatggatcgcattttgaataacaagcagaaggagaaggtggaagtctttaatattggaacgggtaaaggtgtttctgtattggaactgatcaatacgtttgaaaaagctaccggtgtgaaacttaattatcagatcgtgggtcgtcgtgccggagatattgagaaggtatgggctaatcctgattttgctaataaggagttgggatggaaggcagaagccaatttggaggacactctacgttcggcttggaactggcagctgaaactaagagaaagaggaattcaataagaattaagatatttttagaaagaccgatgaacaaaggacgctagtgtggcgttttatagatgcaaataacctgaaacccctcttggatatgtgaatacctgattggcggtagttatgttactcaaaacatagagcaggctaaaaaattgcatagtagttttgtcgtgttttattttgtgtttgtgttgtggctgttctccgacgtgagtcgggggacagttttttttctgactatttagttgttttttagttatttatggctatatttgtcgaaaataatcacgcactactttatgaaaacaaaattttggatcatctgcttatcagttttctttgtgtcttgcttgcgtaatatgcatgatatatatacggggggagaggaagaagaggaggaaaaaatcaataaagacgatttttttgattttactactgtccgtaatagtcaacttatcattgattatggcatgaaagtacagactgctttttatctgtatgatgaatatcctatggaattagttggaaatacttgggaatttaaagatataaatcccatttatgccgcttcgactgatatgaatggtagatttttttcaaaagtatctttgccggcttatttgaaaaaggtatggctggtaactgataatgtgttggtcgtatcacctgttgaattggaatttctatctgacggactaacctttaattatgttgattataaggcacaactgtctgctaacgggcattctagagcggtaatgggaggagtgagttatcctgacggatatgatgtattgggtaattggaatgaaaatggggttcctgattatttgttgcctgaaaagttggatatacccggtgcttttttagagagatgcagtaatttaagccgttctatagtagtagataatcgtaatttgttggaaaggtttccggaactacgtacttcagggagtaatgatatggtaataactaaatctacaggtttggtcgcgacttattttgatttctcgtctactgcgtgggaggatatggttgcttattatacttataaagaaggagagtctgtggacatagctaccataaaaaagaccatcctgattccacgttccagtaggaatgctcctaaatctttagtcggtgagcaaataaaactaaaatattggaataaggaacaaagcaagtatgaagatgaatttccccaaggcactcatattggatggattttattgggaatgggatttggaaaagaaaagggtgtttttcctcgttattctaatcctgcatataacgataataaagagcaacgttcagttttgttaagtgatccggaactggacaattgtttctttatggctatggaagataatgtggacatgcgttttaatgatgtacagtttgctattatggcgtctgcttcttcttctgtagaacctactcctaatataccggatgaagtaaataagggtgaaatttcgtatgtagtcaaagggtctttggcttatgaggacaattggcctgataagaatgattacgatatgaatgatgttgtgatatattattccagtacagttgtgaaagataaatcttctaacgcattggtgcgcaccactactacttttactccgatgaatgatggtgctacttatacaaatgggtttggttttcagttggattacgtagggaaggagcatatagatttggtgcaggtgagtcaagaaggtaatgtgatcggaaaaaactttgagccgggaatagaaaagcctgtattaatacttttttctgatataaagcctgttttcaaaaagcctgtgactgtagtgatcggatttaaaaaatatgataaagtaagcgacatggatgcttatccgccttacaattctttcatttttgtgaataaacgttctcatgaagtacatttgtcaggctataagccgacaagcgtagctgatgagagtttacgtggtacgggtagtgatttgagtcaagactccaatggtatcccaatgtattatatagcagaagataatatgcctttcgctataaatatcagtaacagtgaatttagatggccttcagagaaggtgtctattactacctattatcccgagtttaaacagtggagagattcttttggtgcggattataaagattggtatttacatcctaaagaataataaagggtgaaaggcactgttgtttttgataaatcggactaacaggactttttacttgaaaaaatgtcaccttttgaagccaagtgattcaatctttttgtacttttgcggacaatatgattttataaaggaaaactcacatggattcagtctttattacgacgcgtaagcaacggattatcagagaactaagggattatatgttgattgctcttggtatgctgatgtatgctattggatggaccgtctttttgttacctaatgaccttccttcgggtgcggtgccaggtattgcttctattgtttattgggctaccggtttgccggttcagtacacctatttgggaataaacggagcattgttgatactttctttggttattttgggatggaagtttagtgtgaaaaccatctatgctgtatttgtgctgagttctattctgcctatcatacaggatttgaccgggggagagtctttaatacatgaccaacctttcatggcttgtgtcttgggagcctttttctgcggaggtggtattggtgtcgctttttctgccaatggtagcacaggaggtacggatattatagctgctattgtcaataagtatcgtgatattactttgggccgggttattttgatgtgtgatttggttattatctcttccagttattttgtattgcatgattgggagaaggtggtatatggatatgttgtcttgtttatatccagctttgtcttggatcaggtagtaaatagtgcccgtcagtcagtgcaattttttattatttctaagaagcatgaagaaatagggcatcgcataaataaagaccttcatcgaggagtgacgttcattgacggagtaggttgttataccggtgcgggtgtgaaaatgatgtttgtgctggcaaaaaaacgtgagtctactactatattccgtttgataaaagatatagatccgaatgcatttgtatcacaaagtgctgtcattggtgtatttggagaaggctttgatagaataaaggttaaataagagttccgaagttaaaaaatagaataagggcgttctgaatggacgcctttttttatgtctgttttttgaatgaacttcaaaggatataagactttgttaactgaatgaactttcataatgtaagtttgttgtctgctttatctcgaaaaataagtataaaataatattttgaaattatatcagattatattttgatatcaaaatgttagtttatacctttgctgtataaaataagaaatgataaactaataaataacctgatcatggaaacaaaacttacagaagaaacccgagtagaaagtgatttaattggtgcccgcgaaattccggccagtgcattgtatggtgtgcagactctaagaggcatagaaaatttcccaataagtaaatttcatctaaatgaatatccgttgtttatcaacggtcttgccattacgaaaatggcagctgcaatggctaactatgagttaggtttattgactaaagaacaaaaagatgccatagtgttggcgtgtcaggaaatcttaaatggtgagcatcatgagcaattcccggtagacatgattcagggaggtgccggtacttctaccaatatgaatgctaatgaagtcattgctaaccgtgctttggagattatgggacacaaacgtggcgagtatcaatattgctctcctaatgaccatgtgaactgctcgcaatcaacgaatgatgcttatcccactgcaatccatattggcatgtattattctcatcttcgttttctgccttatttggaatcgctgattggtgcattccataagaaaggagaagagtttgcacatatcatcaaaatggggcgtactcagttggaagatgccgttcctatgactttaggtcagacattcaatggttttgccagtatattgagagatgaaattcgtcatttgaatgaagctgcggcagacttcctgacagtaaatatgggtgctaccgctattggtacaggcatttgtgcggaaccgggatatgcggaaaaatgtgtgaaagcattgtgtgaaattacaggttttgatttcaaattgtcgtcagatttggtaggagctacttcagatacttcctgcttggtaggttatgcttcagctttaaaaaggatagccgtaaaggtaaataaaatatgtaatgatttacgtttgctggctagcggaccgcgttgtggcttaggagaattcaaccttccggctatgcaaccgggatcttctataatgccaggtaaggtgaatccggtgattcctgaagtgatgaatcagatttgttataaggtaatgggtaacgaactatgtgtgactatggctggcgaagctgcccaaatggaactgaatgctatggaaccggtgatggcacagtgttgttttgaatctgtagatttaatgatcaatggttttgaaaccttgcgtacacgttgtgtagaaggtattactgctaatgcggaacgttgcaagattgaagtgcataacagtattggtgtagtaaccgcattgaatccgattattggttataaaaactctacaaagattgcaaaagaagcgttggaaacaggtagaagtgtttatgaactggttttggaacatggtattttaaataaggaagagttggatacaatcctaagtccggaaaacatgttgaagccggtaaaattggatatcaagcctagaagataaatttatttcaccacagactacaggaaggtaaagaacttgtttcatgaagccggcttcaatatttgtaaagccggctccatgagtggtggcaccagttttatttctgccgataaattgatttctagaaatccggtatagtggtttgccactgctatagcgtataaattgttttgccgatattttatcggcagacagtttgtatagcctgtggtatatttttttagaactttctgaatgtgaggcgtgcataatcagatttcagaattagtttcttgcctgttgctttttccaccttaagatgattaatagcttgattaagtccgaaaggtttcaattcattcagtgtcgttagtttttcttcatctccccggtggcggaattcactcatggttacctcatctcctttataagagaaacgtccgatatgagtgcctccatttccacctttggcactgatttccaccaaatgtaactggatactataataaatgcggttacattcttctattttcccattagtatattctatagtcattaattgccatctgccatctaatttgccgttgatgggagctttgtcacaactgctgattcccagcataaagagtatgaataataatatttgtttcatatgttgattgggttgacagttaaaatttctatttattgcccgatttgataattccttgtttgcggataaccagcattccaccataattatttccaagtaagctgccgcgatccatagctccggatacagtgaaactccatcctttcagttgttgtggagcataagttacttcaaacaaagagttgaattgtttcttgatctcattcagaggattatcataagtaccccaatggcgggagtaggagagcagcatacgataacttagcgactgacagggggaaccgcagaatcctatgtgatgtgccagtacacgattgctgataaaagtaatctgtccgttcttgttgtaaataggtccgggaagtaaaggattacctattcccattccccaatgctgccatccttgatagaggtagtgattataataattatctttagcactgatttgctcttcaaatttcccccaaaaggaatcatacagcataggtccggtttgatcttttgttcctaatccttcgtatacaaaagtatcaatgaagcggtttttgggaaaagttatttccagtccgatgtgtccgtctttccaacgtccgtattggaaaaacatttgggagtggtcgtcgaaataatgttcataatagatctttaccttccatcggttaagataagctgttgcggcaaaattccagctaccgacatggtttccgtagatgtttacttgttcgccttcgggtgtggtatcatctccggccataggaaccaatacacgcataaagtcaacaaaccgggtaggcatatctattacaggctctttttgtcctgcaatatattggtctccgccaaattgggcggacatttgtattcctccttcaaattctaccggaaaatgttctttgtttcctactttggcgaaaagcgatttactgtggtaaagtacatcaatggtatatgggttgcctatggaggtgaaatgttcctgccatttgtcatcagtaaaacgtccataggctatgtgtcctttcaaatgaagccatttatgggtacctggtatggctacataatcgggaacttccaggcgtatttggggaatggggcgggcattatttgattctaccatacctccgctgcttaacttggaattctttaattcgggcaagcgttctttgctgccgatactcaggttcaaccatcggtaactgaggtttgcataggcttgttggatgatgaaggaggaggtgaaattgtaggcggttgccaaatccagtcctgcactgaagccgaaatgttggtttaatggcattgtatgtgcaatccctgcccgtaaataaccattttcggtattggcagaagataaaccttgcctgttggcagtaagccacatcggcgcgtaggttcctttacccgatgttcctcccatctcaacgatatattctgttttgacagggagttgggcattggtgtgctgcgtaatagatattaacagaaattgtaataagaatagttgtattttcttcatttagtttatgtgtttagtgctaagcttgctaaaacgaaatcggtttatcagtctgccatcccgaacttttgtgaaaaatttggactctaatcattttatgtatatgaaaagtttcactaatgttcagaatggccgactgtataatcatatcagcaggaattttggcatatttattttcctccggcaggcaggtttttcagccagtaatcagccattgtctttcgcagatgcaagctggttcccttgccttcgtaaattccatgggaacgcatcgggtaagaaatctgtgagaagatttttccgtgccgtaccagttcattgaccaacatttcacaattctgataatgaacattgtcatctcctgtaccgtgaattaacagcaagttgcctttcaatcctgctgcatacgagatgggagaccctttgcggtagccctccggattattttgaggagtattcatataacgttcttgataaaccgtgtcatacagacgctggtcggccacaaaagcaatggcaatgcctgtgtggaaaacatcgggataacggaacatactgttcagcgtctggctgcctccgccactccagccggtgataccgatacgtgcggtgtcaatgaaagagtattgacgtgccaagtcttggatgcctcttgcctgatcttcactggcaaaggttccgacttctccataaatacatttgcgccattcgcgtccacggggtgcattggcaccacggttctcgatgctgactatgatataccccaggtttgccaagtactggtgccataaacttcctccgctccatacatcctgtacggtggcgttggcaggttctccatagacatcaattatgaccggatattttttgctgggatcaaagtttacgggtttgagcatccatgcatccagttccagttctcctgaacgggtttttacaaattctttcggttgcagccccaaggctttgtattgctccttggcttttgcattgtcagtaatcagacgtatacttttatgggcagggaaagacaccatgtcgattacagggggagtttccgagttactgaatgtatggactgcccatttgccggacggtgacatgatataacgatgttgcccgctttggtcaacaggacttagccgctttacctctccattgccgaaaagacgtgcccggtagagatagcgctgggtgaagttgtcgggagaggcgataaagtacacaaaacctttatccatatccgcacctacttcttgaatataatcaaaagctccttgggtgatgggcttgatttctttaccatcacggcttacacgatacaggtggcgccatccgtcacgttcgctttcccaagtgaaatacttgttccctttcaaccaacgcacattgtcattcgtttccaaccatgcggcatcttgatcggtaaagatattgacgagggtattttcacctattttcgcaatccatactttattggtgttttgggcacggttcatttgctggatgaacagttcgttgcagcccggaatgaattccatacgtggaatatagtggttgcgtgtatcacctggaagagccagccaagtggtgtttccaccgtcggctgatacatagcctacttttacagcggagtttgctgttccggctttagggtagggaaaacgttggattttaggataaatggaatctacattattgatgatatcaaaccatcccgtaccttgggtatcgctttgccaataggctatgtattgcccgtcgggactccagcggaaaccgtcgcggcagttgaattcttcttcgtatacccagtcgaatgttccgtttacaatttcattatttccgtcttgagttagttggttgattttcccgtcaaccagactctctacataaatgttgtttctggagacatatgctacccggctggcatccggcgagaacttggcgaacatcaaagtagcttccggcaagcttttgcccaattgttgcagtttgccgtctttcaaattaagcacccagtaatcaccgcgggtatcataacgccatacgcgacgggtattggtatagatcaatactttggagttatcctcgctgaatacgaaattgcggacagagataggttttcctgtttgcggattcagaagcatattggcagggatcagcacttctttggaattgtcctttgctttgtaggcagtgacctcgtatgctccctcggcatttttctctattttggaataacgttctccatctttcatccagttcacgttacttccgccttctgtcttgatcagtcctccgtatacggcctcctccaatgtggggatacgttgcgcatgagttgtggttccgaaacagaataagcataagactaatgtaaataagttctttttcgtcatagttattatgaatcttttactaaaaaatagatgtccatttgaaaacacaagtatgtattgggattccggatatctgttttcaaaaaacgggcgtctattttagaaaaacggacgcctgctcttttcttttttatttaattcctaatttctgtttgattgcagccggaatagcatctttatgcaccatgaggaaaatagtcttggcacgtacatagctttcggacatattcagatacccgccaaatgtattgcgttctgtaccccaagaatttttggtgatatagtatttggtcccgttctggtctttggtaataccggtaagatgcatcaggtggtcatctgtagtgacaaatgcttcataaccttcctgacggacttccggagtgacatttacttcgggacacggtttttcaaatttgtaggcttccgccagcatctctctttgttctttagggtccattttctcaaaacgtgcacggtcggaacccgaaaggtcttccgcttttttcactaccggattgatggctacaccatttttgaatgaaaaacctttttcactgacatcaccgtcccaacatacggtatatccgtgggtcaaagcatagtcggcaacttccatcatttcgtccagcggaagattgtacatttgttcattttcccaattgtcgggtacttccggagagaatttctggtaatacggtttgtgagtgaaactagtcagttcgatataatcgtccatgttcaaacccagactttcggcaaaagatttcggagtgtactcttttcctttgtaagtgaacttttcaggaagttctcctagataagtatcgaaaaggttgttgatcagcttgtagtattccgggctgcgacgtttcatcttaacggctgtgtttcctaaagcgttgatatatctcaccatttcgccatggttatgtttctctgagttatagttgattccgtgatatacttcctcgggtacgatacccacttggttgaaagcattcttccatgtgtgtgaaaggcttccttgtcctaaattcccgttgcctccccggtaatagttgtcctccaattggttcaagtacttttggcgtacaatgaacatttcagaaagatcatattcccctttgcccatacggagcagttcggattccatgaacgaagtggtggcaaagcaccagcaagttccggtagaggcctgatttttgactggagttgctttctgtgatgcaacagtcgtgaatttgtaaccactttcttgtgcatacatggctgatgcacagcatagcagtgcggctagtgtgaatacttttgtcttcataagtttgtttttaatatgataaggttaacaattaaaagccgaagcgtgactcaatccaatattggtttgccatttcgtcccagcgaaggatggtggcgcctataaagtctgccgtgtagtctgtgagataagcacgggctgcttcttcccctttagattgaaggatactttggtattgtgcttccacaaatggaagttcccgttgtcctttttcctcgaaatgacgaatatttttttccattactttgcgggcagttccccatcttacagcagccagtttgttggcgcggcgatagtgccataaggcggcgtcgtcgcgatagcggtggttaccgcagattttatacatagcagggaaatcagtaatgccacagaataccggaacgcgcgggctttgtccggggttgtccatagagaaccataccacaccgcctactgcatcgggcagccagttgcgcaattggataactgtagaataagcacattgcggaactgcgatattgcgtactgatttcacaactccctttttaataccgttcagcatattcagttcatcgccacgcatccacggattggctttcgggctgataatggtgtctacttttccggtttttctatcttttaccgtaactttcagattctgtgtcatatccagcggcgttccttcgtatgtttcccggagcaatgccataacatcggttacagatacttgcttgtcgggttttacactgataggcagttcttctgcttcataatcaagctttaatgacggtgccagtgcattcaggataaagtgctcgcgggtgctgaaggatttcagttggccggagtaattctttccgctataagctttccaaaatttaaaaggctcttttccatcccaatatcctaattttttagccacgtcaaatacattttcggaagccatatagtggtcgggatctttcagattgagggtgctgattcgcgagatgttggcagatacgcctacatgatcatccggaatacggactgccgcccatactccgccaattttatcttttccttctccgaagacttcgaagtgccatacttcatcaggatcggcaatggtcagacattcgccgctgtcgccataaccgtattgttttatgagatctcccatcaggcggatagcctcacgggctgttgtacagcgttgcaatgccacacgttgcaattcttcaatcataaacatacctttgggattttccagatccctgcgtccgcttacggtagtttcacctatccccagctgcttttcgttgatgcaagggtaggaggtgtccatgaaggcatatgtttttctagcttgtggtatttgccccttgatttttacattagtctggtcggctacaaactcggtatgcatacggccatcgtaaatattcattacagtatccctttcataactttctgccggaaccatgtttacccaggttcggtaccagctgtcgcatgtatgactggttataactgatccatcggtagttgctttctttcctaccataatgctagtgcagctttccggatcctttgtgtaattcgtttgggctgtgacactttgtgccatgactaaacccaggattgttaaagaggctagtagtttcataaaggtcgttttattactattgcgtttcaaaagtatataaaaaaaactattattcagaactttatcggtttaattttgtaatttatgtctaataatccagccttttttgtatttttgcagcaaatacaaaaattgggagcacatgacaactagtatagacatagctagaaggatagcagaagttaaccatcctctcagtagagaaagtgttcacgcattagccgaaatcttagtttgtagaaaatatcgtaaaggggagattgttttgcaggccggtgaggtttgtaaagcgatgttgtttatagaaaaaggaatgctcagacaattttattataaatatgataaagatctgactgagcatatcggttatgagaacggaatgattatttgcatagagagttattttaaacaggagcccacccgcttgatggtggaaactttggaagcatccgtggtatgggagttaccccgtgtggaagtggagaaattgatagatcaatatcacgatatcgaacgtctttatcgcggttttatcgaacattctttgatagagtcacaggtgaaggcggacacgcttcgttttgaaccggctcatgaacgttataacagattgttgcagcttcatcccgaaatattgaagcgtgcgcctcttgtgtacatcgcttccttattacagatgactcccgaaaccttgagccgtgtccgttcttccttgctttagaattgataaatcaatcctaaccgggtttcaaaggtcttatattttatgtcctcatggtaggaataatgtgtgtggcggtagtaataggacacttccatattggctttgaagtgggagcttagattcaactcgataatcggattcactacagcgagcattacatttcctttgtctccctgcgcattcagatagagcggatctattgtttccaaatccttgtgttcgtatcctttccaggtaaaaatctggtaaagatgcatattcagtgcgaacatgccgtaacggccgaagtccagaatggtgttgttctttatgctgtatccgcttcccatattgtaattgcggtctattacgttgtaatagtcggtaaggcttccacccagcaggatggcactcaggaacacacgctgttccaaatttaccaggctgttcattcgggggaatttataaatcatacccggtcccacactggcagcttccgaaatcttgtaagggatacgccccgatccgtcaatcacttcctcggaatcaaaatagttgaagtgctggaagataccgaacatcatttccatgccggtagtggttttcaggggaacaccccatagtttgcccatcaggttgatctggctgataagaggctggttcccggaaagaccgaaggtggcccgcgcggtgaagtaatcgtatgggccgtcattcactttatcgaaggcatctccgtattgtacccggaattcaaggtagggattgtgctctccacggaacaggtaattgtcatcggccagataacggtcaccggcacctatggaaaagtgtaccggaatgcggtcgtaatcgtggtatttgtaatgagagcgttttactttccacatctcgccggttatcattcggttcaatccccgcatggggcagatcaaggttcccaaaaactcgcgggtgaaacgtgagaaaccacgcttggagtcgtccagtaccaaagaagacatacggtgcgttacttctcccagggcgatgccgcctagggtggttgccatcaggtcattgatggcgggcggctccacttctgcggctatttcccacatcaaactaccagcaaaggcgtatggagccgattcccaaaaggtaagtccgttgctgcgtgctgcattgaaataaagatttccgtgataggggtgggcgaacaggttggtggagaattggtcgttatcccatacaaaaccatgcttgatattgcgccgtatgctgccgatactgattttggcaaagtcttcgttcattacataacggtcgaatgcccatactccgacattcattccgaaagtttcggcggcggcacgccaagggtgttttttttgcaggcgaggatcggtgaatgtatacatggaatcggggcggtggagcatctgggctgtgacgttcccggcacttaatgccagcaggcagactaatgcgatatgctgtagtttcatactgtatggattagtttatactagggtgacggggctgcttaaaacaagataacacctgcttcgaaaataggttttttttcgtagaacttatttttatcatagtagcgcgtcatgccgtaaccacccgatgcaaagaaactgattctggatttgaatttatattccagattgatacgggcttgcaatgaatacatgcgttccggtgtttccgcatcttcattttcaaagttttctatatggaaataacctaagtcgccacttagttccagtttggaggcgatgggatagtaaagaccggcacggtagaacacacagcccgaaaatttgtcattcaaatccagatagtgtgtaccgatacccagcatggtataactccggcggtttttaaaacgcacggcagcattcagtttgctggtgttacctgcaaacagcatcatctggatacgggttttgggagtgatattcaccaaacctagtttatgggcggtagtatccttgctatggttgatgattcctatttgtattccttttacattcccgccacacaggttgagtaaaccgatttgcgcgccgcttacttctccggcgtagttgccgggagcgaactgcacaccgcgtaacttgccttggcaaacattggtcagtcctgagaattgcagggcattttccgtcttgacggcgatatttaccgcaccgcaaagctgcaagcctctgatttctccggcagcgatattgctgatggcggagaattgcataccattcacgtttacacctacattaccaatggctgagacttgagcgcctttggcttctccgccactgatattgagcagggtggaaacttgtgctccgttcagtttctcggcagatacgttcatcagtccgccgatagcgacgccattttgtgattttccggcaatgttggccaagccggctatctgaactccttgggctttgttgccggccagattcatcagaccgccgatgataactcctcttgatatgtttccggcaatgttgcctaatccggaaatttggataccgttggctttccctccggcaacattcatcagtccgctgagcatgatgccattggcattgcctccggctacattggcaatacctcccagttggaaaccggaggcgtggcgtccggtaatgctggcaaggccggagatttggaaacccgtcatatcgttttgtacaacactggatacagcgttgataccgattcctttcagttgatagatatttgtaagcagaccgatattcagataagtggttttgacactgtctttcttcgcggaaatgttcaaggagatgttggggccttttttaagcttgtcctttttctgggcaaaagcaggagttgacatacctgcacaatatcctaaaaggagtattgctgctatacgcatattcattttcatacatttttagtttcttgggtgcaaatgtaataaaaatgtagatataagggggaattatggggagaattgatcggggtgcaagagtaaaattatgttttgtattgtctcctttcacgcatcatgatccaggtgtccatatatgcggatgtataacctgtaacatctataatgtatagcctgcaacatctataatcttcagacttatacattatatatgttgcaggcaggttctttttctgtcaggtgttattttacttcctgatataagaaacgtttgatactctttttaggagttttctcgaattcttccggatagatttttacacgggctatttgtgaatatgcaggaagttctgtattcaagttgatacggttctcttccatagcctgtgctatcgcgtcattatccagcccatgagcaaaggcatcgtcgaaatcgggataaaccaaagccgccagtttgctgtctgcctgctgtatgataatgctttctgaaacgaacggcatgttattcaatttatcttcaatctcttccggataaatattctgtcccgatggacccaacagcatgtttttgctgcgtcccttgatggtaacgttgccttccgcatccataacacccaggtcaccggtatgcaaccagccgtccttgtctatcacctcggcggtagcttcgggattcttgtaatagcctaacattacattaggtcctttgcatactatctcacctactatattctcagggtcggggctcaatattttgacttccatacgaggagccgcctttccgcaggaacccggcttgaaatatttccaatcttcataacagataatcggagcacactcagtcatgccatatcccacggtataggggaaatctatacttttcaggaactgctctatttcttgattgaaggcggcacctcctacaataatttcgtagaaattacctccgaaggcatttatcatctgttcgcggactgtggctttgattttatcattgatgataggaactttcagtaaaatcttcatagccggggtttccagtttgggcagtacattcttcttgatgattttttcgataatcaatggaacggctactaccagattgggtttcacttcggaaaaggcttggaagatgattttcggactgggggtacgggtcaggaaataaatatggcatcccacacagaattcataaaggaactcgaaagccagtccgtacatgtgtgccatagggagcatggaaaccagcttgtcacccggattcattttcaagacatcaaaagcgaactgggtattcgaccacaatgcgcggtaaggaatcatcactcctttggaataactggtcgtgccggaagtatagttgatcacagccagttcttccggtgtatcccggcggtagctgacatgttcccggcggaaattgcgcggatatttctttccgaacagttcgttcagatgatcgcgtgcatagtccaatttggaactgcgggaaactagcagggtatagtcattcatcaggataaccccttctaacaacggcatggcattttcattcagattctcccataccatatcgcccaccatcagcaggcgtgcttccgagtgattgactatattatgaatgttgtccgatttgaattcgtgaagaatgggaacaatcactgccccgtatgtaacggcagccaggaaagtaactccccaatgagaactgttgcggccacagacagctatcttgtctccttgcttgatgccgcttaattcgaagatgatgtgtagcttttctattttgcgggctacatctttatattgtaatgtggcacctttataatctgtaagggcatccaagtcccagtttttctttatactgtcttccaggaaggcaataaaactctgctccattgtatatactcttttgtttatattttgcacaaactttaatcaaatgtgcaaatataagactttctttggagcatacaaattaaacagaaggaaaaatagtgattagtggttagtggttaatgagctgcgctgtgatgtcgcatggatatgaaccactaatcactaaccactgatttttattctttgctgctgaaatacttcatgaactgtgtacgttcaaacggattgctggctccggtagacagtgcgttcatcgagctcttgaattcgctgatgtccttgtagccttgccggttcatccattgggtcatttcatttgtcatatctgcaatggcctgattgcctctttggtagatgacactgcacagttctacagccgaagcgcctgccagaattgctttgactatcgcttttccatcgtgcacaccgcccgagatggcatagtctgtctgaggaacttgtgccgaagcgatagcagtccagcgcagtccgttggacaagtcggcaggagtactgaatacatcgcctgcagaatatgtcatggtgtcgatattgatatccggctggtagaatcggttgaacaataccacagcattggctccgttggcataaagctggttgatcagtgcgatggggttggtcagattgctgcccagtttcacaatgacggggatggaaatctgtttcttgatactgcttacgatatcgatatgacgctgttcgaaagaaccgtattgatattctttttcggtctgcaaggaaaggatgttgatttccagtgcgtcggcttctgctgcttccacggtacgggcaaagtctgtccattctgagttgctgaagcagttgatgctggcaatgacaggaatggtgcaaagctttttagtctgttcaatcaatgaaatatattcgttcaatgcatgagagcgtacatatgtgctcaagtagtcatctccttcgggagagccataagtagccatgtgatgtgcttccatcatgatctgctcttcgaaaactgatttcaaaacaatggctccggcgcctgccagctccagtttcttgttcttttcagcgctgtttgtaaggctggaactgctgatgattataggattgcgcagtgacaacccggcaaaagtggtttttaattgagtcatataaatagtagttttaatagtttcgttctccaaagattttgcttcctaccctgactagtgtacttccggcttccactgccagcggataatcgtgtgacatacccatggaaatttctttaaagtattctgaatcagaaaaatagttctgctttatttctttgaagaatgtatttaaggaacaaaattctcttttgatttgttcgtcgtcatccacattggtcgccatacccatcactcctgataagcggacatttttcaaatccttccatccgcctgtatccagcatttccctgcattcgtcaaaagagaaaccgaacttcgtttcctcttgggcgatatgtatctgcaataaacaagggatgacgcgatggactttggaagcttgtttattgacttcaaccaacaatttatacgagtctatggcatgtatcatagctacataaggggccatgtatttgactttgtttgtttgcaggtggccgatgaaatgccattcaatgtctttgggcagggtttcatatttctgagtcatttcctgcacgtggctctcaccgaaaatacgctggccggcagcatacgcttcttccaacgcctcgttgggatggaatttggatacggctaccaggcggacacccgcaggcagttcggaaagaacttcttttaaatttgcttgaatgctcattatctgttatactttctatttttttatcaggctttattcggtttttccggcatccggaaattcaggtttcacatccggttcggcttcgtatgggtaaacatccatgatggcggtttcggctacggacgcaatcacgtagtctgccattgtacctttcattccttcgtccagtttctttacagcgtcgcgaaggtcggaagcttgtaccagtacggtagtggaggtctttttctctgctccgcttttttcgtccagcgtaatgaagaacagcttgcacttaaaccagcggtcggctgcatcttcttcagaggggaacagttcgctgtagttggcgcgtttgatgtccgaaacagtgaactcgccgctgatatacggagtgatttcttcaataatacgggcttctgcttcagtaaagctcagcgcgtcaaccaaatagggttccgttactttcttattcatgccgttttccatgactttttcgtaacgtatcttacattcaaaccaagtatgcatcataaaagtttattgttttattgaatattaaattggatacaaagatacaatttatttaatcttcgtctcccattttacttaatttcttcatgctttccttattccactagtttgcagctgttcaattgcatgaattcgtgaatcactttttcatgatcgcccattaatatgatgtgatggttacccaaaggattacgcataaaatagtctacgggtttgtccagtttgattcttgcctgggtgcggcaggcattgatgtagttggtattttctatcagttggcctgtggaaacgaaatactcgtccagacactctcccgcgcattttatcatcgtgatgcctcccggatgcagaataccctgtatggctatcccggtctccgtttcaaaatgattccggatgataaactgatccaccattttggtggcaatcgtacagtgagccatcactatttcgttctggtcatcgttgatgaatgccggattcgccatgaatcctgcctggccggtcagtgtcttggcgatgagcagagtaaagatggattgcaagtctccttcacatccggccgggatgccttcatcattcagcagggcaagtgccagacatccggtagttcctaatttctcaatcaacgagaagcaggagagggttaccgcatccagctttttcttttcgcagattattttcacggcctgataaagacgcatggctttcagcaaatcttccggagttccttcccggcaggcaatggcacggttggcaaatacggacgcctcatatcctatatcatcatcctttatctgataaaacagacaatacacttcctccatggggatatcaatgaactctattccccagcggcgtttggcaagcaggtaatctacattgctggccaccagccacggagaagaatatccaacaactcctattcgttttcctcttacctcgcgctgggcggcgaaagccttgtgatgatctatcagttgtttcaccatattggggatagtgccatgaataatatgtactttcattcctttgctgcgtatccatgtagctatttccagggaagcagccagtgagttctgttgtccgtcggtcagcagatggataggatagggaagtagttcgaagtgttgggtgaccattttttctaccccgcccgaagcgatgaaagccatccggtaggcatctgccggaatacttgcagcctctgtatatggtaccagatgaagcgtgaaaaacttctcgatttccacaaataaatctttatggcaatcatatacagattcaattctgttcaaggaggactggaaggttatcaggtatagattcatttgatattttgctttgttttactggaacaaacttacatgtttttttttaataaccctaaaaaatgcgcattaagataacaaagatttaaattcttaattaattgtttgctcggttggttgcgaaagtctatctttgcacttcgattaaataatttttataacattatgccaataatatccatcagaggaaacgagatgcccgcatcgccaattcgcaaattggcaccgctggccgatgctgcaaaacagagaggaattcatgtgtatcacctgaatatcggtcagcccgacctgcctactccgcgagcggcccttgatgcgattcgtaatattgaccgtaccgttttggaatatagtcccagccagggataccgcagctatcgcgagaaactggtgggttattataagaaatatgacatcaacttgtctgccgatgatatcatcatcactaccggaggttcggaagcggtgctgtttgcttttctgagttgcttgaatccgggagatgagatcattgtgccggaacctgcctatgccaactatatggcgttcgccatttcggccggagccgtgatccgcacggtgacgactaccatcgaggaagggttctccctgccgaaagtggagaagttcgaggagttgataaacgaacgcacaaaagctattctgatctgtaacccgaataatccgaccggctatttgtatacccgccgcgagatgaaccagattcgtgacatggtgaagaagtatgatctttacctgttctcggatgaagtgtaccgcgagtttatctataccggttctccttatatctctgcctgtcacttggaaggcattgaagaaaatgtggtactgatagactcggtgtccaagcgttattccgaatgcggtatccgtatcggtgcgttgattaccaagaataaggaagtgagaaatgctgtcatgaagttctgccaggcacgtctgagccctcctttgatcggtcagattgctgccgaggcttcattggatgcccccgaagagtacacacgcgagacgtatgacgaatacgtggagcgccgtaagtgcctgattgacgggctgaaccgtattccgggtgtttattcgcccataccgatgggtgcattctatacggttgccaaattaccggtggacgacagcgagaagttctgtgcatggtgtctgtcggaattcaactatgaaggcgagacggtcatgatggctccggctgccggattctataccactcccggtgcaggccgtaatgaggtgcgtattgcctacgtgttgaagaaagaggatttggtccgtgcgttgttcgtactgcgtaaggcattggaagcatatcccggaagggtagaagactgatatggactggaagctctttattgccagacgcatctatcgcagcaatgagggtggaaaagaggtgtccaagcctgccgtccgcattgctatgctgggcatagccatcgggctggccgtcatgattgtgtcggtagcggtggtgatcggtttcaaacatgaggtacgcgacaaggtggtaggcttggggtccgatatcgtaataactaacttcgactcccagcaatcttatcagacggttcccatcgttgccaacgacagtttgctccatctgttgaaaacactggaaggagtgaagcacgtgcagcgctattccaccaagccgggaatgattatgacagacgacagctttcagggaatggtactgaaaggtgtttctcatgaatacgactggaggtttttaaagaatcatttgcaggaaggggaaattcctgttttctcggatactgcctctaccaataaggtattggtgtcccgcactattgccgacaagcttcatctgaaactgggtgataaaatctatacctattatatagaggataatgtgcgcgcccgccgtcttactgtcgccggcatctatcagaccaatttttccgcatacgatgatttgtttctgataaccgacttatatacggtgaaccgtttgaatggctggcagaaagggcaggtgagtggtatggaactggaagtgaatgagtatagccggttggagccggtgaaggaggaaatccgtgcacgggtggatacgcaggtggatgcatacggaggtacttactatactcagacggtggaggaagtcaatcctcagatatttgcatggctggatttgctggatatgaatgtgtgggttatcttgtttctcatgacgggggtggccggattcaccatgatatccggtttgctgattatcattctggagcgtaccaatatgatcggggtgctgaaagcattgggagctgataattttgctatccgtaagatattcctcagtttttctgtattcttgataggcagggggatgctatggggaaatatcatcggggtggcattatgctttattcaatctcaatttcatcttttcaaactggaccctgccacttattatgtagatcgtgttcctgttgaattcaacatttggatttatttgttgctgaatgtctgtactttgctggtgtcggtgctgatgcttgtcgggccgtcatttctggtgacgcgtattcatccggcaaaatctattcggtttgaatgagaagattctctttctgcgttttccgtatatccggtattaatccttttttcctataatgctaaggtctttttcccttatgattaagtctttttatgcggtaatgtactacagtctcctacagtgaatcgtatagtccattatagtggactgtacggtctgatgtaatggactgtacagtctgttgtgaaagtctgtagtagttgatagaaagaaaagacctaattgttaggaagaaatgctttagtcgggcggatgtgttagaaccaaccctgctgcgaattcgtgacagggccggttctttatagagagaatgtaaagttacgtatagtatgtcacttccttcagttcacagtttgcagaagaaagaaacgaagaaaggcatgcttatgtttatcagtatgccgtggacgatggccacgggtacggcttccggtccggagcagcgtgcgatggctgccagggaaatgtcggaagaaccgatgcccgccgccgagataggcgccagataaccgaaatatttgcggaaaaggggagctcctatcaaggcggtcatttcccggaaaatattggatagtagtgcgatggtccccaattcggtagcaagctgcacaccgatggagggggatttgatctgcgtgataaggatggaggaaacggaataataggagaatccgcttccgacagccatgcagtcgaaaatactccagcggctcaagagaaagcctccgatggcggaaaacagcagagtgccgcttacggtggcaaggggtacaagcagtgttctgaaattgagggataagacaaactgcctgaggttgcggttgcttccaagattaatgccgagtaacagcatcagtacatatagtacatatacagaggtttggtgtacgtcgaagtccaccgcatagctgactccggctacgcagccaaacaagaaaaaggctagagttacaagactacttttcaccgcttgccccctttcctttgaaaaagatgtggtatactgcaagggaggccatcatgctgcccaatatgcttaatgaggagatgacggctgcctggccgcagaagtaaccaagattgtcaataatcagtctgttaagaccaatagagagaccgagtaagaaaagtagcagacagaccacgatatggatgagaggagtgatcttgcgtacttgggatttgtggcgtaagggatagcctataaggactccgacagccattatagaaatgaaagtaaacatgagattcaactgtttttctgattttacaatattacttataacacgcttttggacaaacgcatttacggtatattggtaaagttgaaagaacggatggaccagattattttcatacttatgctttcaatttgaaactttttgttgtttttaaaacgggtgcaaaagtagaataattgtctttaatatgcaaataatatacatattaaatcttattgaagcgaaatatgatataaaacaaacaatatttgtgatatttcgttgtaaaacgaaggttttaaattgttacatttatagttttaccgaataatattgcatgtgcatgggtgggtgaaaacaatgaaaaaggggctgtttggggtgtgttagagaatatgaagcgataaaaggtttcaatttgttatgctggataatgtgatactcttctgttttttcaggcagtgattacattggtggaaaagtgtttcttgcataacctttcttggcggataaaaacaaatcagggtttgtataaacaagccctgatttgtttttgtcggatcaagatggataaccggatttagaattcaaatttttctaatttcatcttgcccaattcttgcaatttaggaaccaaggttataaaatgtgcagctttttcgtgtgcatccagtgactcagcatctttccatgtttcgcaaatcataaggacatctttccgtgtcgcgctctcaaagatatcataagcgatgcaacccttgtcgtttaaagattgcgctaccaattcctttgctgtttctaagacagcattgcggttactctcgtttacttggataaaaacatttaatctgatcataattcgtattattaaattaagaaatgtatagttggtttcattctctttttattttctcataaactcatttttccgtctgaatttacgttgtaatttgaataccccattccatgcaggttgcagaaaatcgaataaggggagtagtgcacagaacttccgttcgccaaaaactttggcggtttttctgaaaacaatcagttgcatcgtgaagcgtgctgaccatagcaaaacggcaatgcctgcaatagtccattggtggagaagaatactggtggttatagtggcgatgatggctgtatagaacaagaatctgctgcaagtctcaaatcccatgagataacgggcggttccatgaaataaccggctggtagccgcatagcttattttctcttcacaccatattcttttatatttaggcatggcgattcgcatcagactttcagggctggcttcaactcgtgtattgtgtgcacgggctgtttcattgatgaacaaatcatcttctccacgttgcagattcaggtgggaggcaaatcccttctgcttgtagtacagcgttttccgataagccatattccgtcctgtgcccatgtagggatgtccggacacagccatacccagataacgcatagaattcagcaacgtgtcgaaagtgattttcttattaaaccatcccggtactttttcgtagttgctgtagcctaaaacgatttcggtggcaggtgtgaaattacgtgccatctgtttcagccattgattgctttgcggacggcaatcgggttcggtaaataccagccattcatggcggctggctttaattcccattgttattcccagtttcttgtggctgatgtagcgtgcactgtcggggataaaggtatgatagagattgggatatttgtcttccagtaatttcaacgtattgtcacaatcatctgccgggcggtcgtaaatcacaatcacttcgaattccggatagtcctgctctaaaataaatgggaggttttcttgtaattcgtgggctgcgtcttttgccacaatgatgacagacagtggaggattttgggtatttatatcagtggcatatgctgtttctctgctgtgagtgtatagtttgttatatagccccagatagtaaacggcctgcgtggtgaataaggctcccgaagctattggtaagattgtatctatggtgaatggttccatgtgtgatctgttttaaaaacgtgcaaaaatacagcaaataattgaattgtagcaggatgaatattctttatttattcaaaagttcagatttaattataatttaatgttaaaagtgtgtttccgtgaatatttttcaagtataattgctatatttaaggaagttaactgaaacctgtaacaagtcctgaccaacgggcaattattatgagaatacaatttgagattaaagaaagtttgatcaatatacttgatcagcttatgcattccgacttttgggctacggaaatcaaggaagatgagtcaggaaagaagattatcaagattaaagacttggcttataacttagaagccgtggccgaggtgatggggaatgaaatttttattagaactgctttgtctaagtacacgtatcgtatttatgaggtgaagggggagtgctggtgcgagtatgtgggggcctatcgcggttttttggaacagaagctccttccaataattactccgaaggaaaatctgttggaatgtgaggtgctggatagttccatattaggaggcaaacagaaaactttgcgtgagtatgcggaagataatttaaagctaaagaagttccgtgaacagaattttggtaataatggattttcaaaagcggatcatccacggcgtgtgtatgatgaatttataaaagaagatttcattccggaagataaatagggacattcattaaatattacaaaatcagccaactaattcatacacaaagtattgcgaattagttggcttttttgtatctttaggtattcccccgaaaataagatttgacggccaaaacgggggaaatatccaaactaataagatatggcaaagatagtgaatatttcagaaattcaccctactttgggttttacagaatttgatattctggaaaaataccgcaagagttttaatgagagtgagcttggcaagcttcattcggtctttccgtttgaatgtatggcaaaagccgccggcctgtcggaccggcgcctgggacgcaggaacagattcagtccttccgcaaagatcgcccttatggtcctgaaggcatacaccggattctccgacaggcaactggtggaacatctgaacgggaacatacactaccagattttctgtggaattatgattcccccgtcccttcccataaccaacttcaagatagtcagtgccatccgtaatgagatagcatcccgccttgacattgattctttccaggagctcctggcttcacactggaaaccttatcttgataaccttcacgtctgcatgaccgatgccacatgctatgaaagccacatgcgttttcctacggacatgaaactcctttgggaaagcctcgaatggctctacaggcatatatgccggcattgcagggagctgggcataaggcgtccgcgcaacaaatacaggaatgtggcggaatcctatctgtcctactgcaagaaaagaaagaggagagcttcaaggacaagaatgcttaagcgccgtatgatcaagcttcttgaaaagctcctcagtcaaagggatgggatccatagcgagtacggtgctttactccgatatacccaggattatcataagcgtctttccatcatcagaaaggtgcttgtacaagaaaaggaaatgtttgaagggcggaaagtcagtgaccgcatcgtcagcattgaccgtcattatgtacgtcccatcgtcagaggcaaggaaaccaagtccgtcgagttcggtgcaaaggtcaataatatacagatagacggcatatcgttcatcgaacacctctcgttcaaggcattcaatgagggtatacgcttgaaggactgtatccgtatgcagcagaagcttatgaatgtaagggtaagatgtgtggctgccgattccatatatgccaataatgccaacagaaagttctgtacaaaatatgggatatccacatcctttgtgcgcaagggaagggcggccaaagatgagcctttgaggaaggtgcttagaagcgaactctcaaaagaaagggcaacacggcttgaaggaagcttcggcactcaaaagcaacattactcgctctcaaggataaaggccagaaacaggaagacggaaatactgtggattttctttggaatacatacggcaaatgccatactgatgatagaaaaaatcagaaacaaaacagctaaagcagcatgatatgattttactcacagaatcagaagaggtcatcagacttcttccggaacgtcatgtcctgtcggatagaagtatgtgagaaagcacggaaaaatgacaataagaatggcatatgaaatggtcatgccctatcatcttcatatgccatcttattttttagagacatttactgaatatccctaaataagaaacagcgccgctttgcatcaaagcggcgctgtttcttatttattcaggcagttggagttggtttatactaactcttctgaggtatatcctttgggcaatgcacgacaattgtaagccgatgccataatttcaccatatgctcctgctgaacggagagcgaaaaggtcgccacggtgtgctttgttcaaatcaatagccttgccgaatacatcggatgattcgcagatggggcctaccacatcgtaagtttccataggttcttccgaagtgatattttctattttgtggtatgcctgatagagggcaggacgaatcaagtcggtcatgccggcatctaatatggcaaactgtttgttggttccttgctttacataaatcactttgctgataaggctgccgcactgtcctactacggcacgtcccagttcgaaatgtaaagtctgctgggggcgcagtttcagatgcttgtgataagtggcaaagtattccgtgaagttggggatggcttgacggttggggtgtgcataatcaattcctaacccgccgcctacattgatatgttctactatgatttggcgggcatagagtttttcctgtagttcgtttacacggttgcacaaggctacaaaatcacccatatccagaatctgagaaccgatgtggaaatgtaagcctacaaattttacatgaggcaatgttccggccatatcaatcactttgtccatatcttccatgctgataccgaatttgttctctgctagtccggtggtgatatttgcatgggtatgcgcacctacattcggattgatacggaaagctacacgggctgttttgcctttggcggcagccagttcgttaatgatttccagttcgggtacggactctacgttgaagcagaaaatatcataatccagacccagattaatttcccagtctgtcttgcctacaccagcatagactattttgtttgtcgggaatccggccttaatggctgcgcggatttctccgccacttacacagtcggctcccagaccgctttcgcggataattgtcaggactttgtggttagcattggccttcacggcgtaatgcacgcagaaattattgtatttgcctgcttctttgttgatgcatgacaaggtttctcgcagcacattgacatcgtaatagtagaagggagtttccaactctctgaacttgtttacggggaatgttcctttcatattgtattttgtttttatgagcaagggcgaattaaattcgcccgaaaacaccaactttgtagagtgggatgtattcgggcggattcaatccgcccctacagtagaaattatttattgttgaataaatgatcgcttaatgactgcaatgctttcttcttgtcttcttcacgaatcaggaaagaaatattgtagttgctaccgccgaatgaaatcatacgtaccggtatgtcgcgcatggcgtccaacgctttggcttcaaagcctacgttttcccattccaggtcaccgactacacagatgatacacatatcctgatctacggttactgtaccatatttcttcaagtcgtccagaatttcattcagatgtttggtgttatcaatggatacggaaacaccgacctctgaagtacagatcatgtcgatagaggtctgatagctttcgaagatttcgaatactttgcgcaagaagccgtgggccagtaacatacggcttgatttgatcttgatggcagtgatgttgtctttggctgcaactgccttgattttgcctttttccgtatcattggaaatcaaagtccccggggctgtaggttccattgtattaagcagacggacgggaatattggcatatttggcaggctgtacgcaagtagggtgcagaatcttcgcaccaaagtaggccaactcggcagcttcttcgaagtgcaggtgacgtacaggagaagtcttgtctacgatgcgcgggtcattatcgtgcataccgtcaatatctgtccatatctggatttcggaggcgtttacagcggcaccgatcagtgatgcggtatagtcgcttccgccacgttgcagattatctatctcgccataggcgttacggcagataaaaccttgtgtgatataaatttcagcatccggatgtatttccagctgtgcggccagtttttctttgatatatacaggatcgggctccgagttcttgtccgtgcgcatgaattccaatgccggaagtaagatggcgttgaccccttgttcctgcaaatagttggtaaccatgttggtggagatcaattcgccttgtgccaggattactttttcttcgaacagtgtgaaaatatcttttgtatacgaacgaatataatcgaactgtgcttttataaattcctgtgttttctgcttatactcgtcagtagaataaagttcattaacatgctgtttatatttagcctccagtctgttaatgatttcattcgcaccttcgggatttttcttatacagataatccgaaatttcaaccaacgtgtttgttgttccagacatggctgaaagtacaacaatcttctgttcaccgtcggtaattaatttggctacttctttcattctttgtgcagaacctaccgaagtacctccaaactttaaaactttcatttttcgtttcgtattttaattgttcctatattgataattagcgtgcaaatatacaaataagactgcaaaaatcagcattttagcgatgatatttatcattcatctacttattctgccgtttcttggggtgtaactgtcgttttttctcctttttcggtctcattttgacttctttccatccggctgtattcgtgagttacttctttgatatgatgattctcaaagcggtagacaactcccggatattccgacaggagatgcagattatgggtggtcatcatgatggcggagcctgtagcacaaatggatttcagaagttctacaattttgcgccctgtttcggtgtccaggttacccgtcggctcgtcggccagaataatgtccggccggttcaggatggcacgggcgataacaatgcgttgttgctcgccacccgatagctcgttgggcattttgtatcctttgccggtcattcccacttggtccagtacttcttcaatgcgtgctttgatggttgctttgtttgtccatccggtggcgcgcaatacaaaactgaggtttgcgtgtacggtgcggtctgtcagtaactgaaaatcttgaaagacaatgcctaaacggcgacgcagttcgggaatatgcttccgcttgatgttagtcatgttgtagcctaacacctcagcttctcctgactgtatatccagctcaccgtaaattgttttcagtaatgaggtttttccggaaccgacttttccaatgaggtaaacaaattcacccttgttcagttccaggtttacatcttccaatacgcctaactcttgttggttgatatatacgtttttatatcgaatgagagcttcgtccatcattttaatgttttttccacgtagcgctatgacgttctttcaattcacgggcaaggtcttcgatgcgatagccttttgaggtgagcagtacaatcatgtggtatatcagatcggctccttcgtagatgaggcgttcgtcggttccgttacaagcttcgataaccgtttccacggcttcctcgcctactttctgtgccattttgttgataccggattcgaacaggctggtggtgtaagagcctgcgggcatttcctcgtgacgtttgtcaatgaaatcttgtaattccttcaggaacatgatgtcttctttgttttcttctccccagcaagtatctgttccggtgtgacatacaggacctgccggatttactttgatcagcagggtatccttgtcacagtcttcttttatagaaacaacattcaggaaattcccgctttcttcaccttttgtccacagacggttcttggtacggctgaagaaggttactttaccggtttccactgtctttcggtatgcttcttcattcataaaccctaacatcagtactttgctggtgctgttgtcttgtatgatggcggggatcaacccgttcattttttcgaaattcaaatccatttttctatattttattgttatattatcggtgttgtatagaacttgtttaaaatttcatcagcatcgtcattcagagtggaatgaggatctgaaggtcgtttgccagtctttcatcctgtttgggatggtagtggaaacagatttagatgcaattaaaaacagagttataacctcacattaattccttgttcgcaaagatattgttttaattcgggaattttaatttctccgaaatgaaaaacgctggctgctaatgcagcatctgctttcccttttgcaaatgtatcgcggaaatgttccatgcatccggcgcctccagatgcgatgacgggaattgtcagtaaatcggccagggtggagagggcttcgttggcatatccgtttttcactccgtcatggttcatgctcgtgaaaagaatttctcctgccccgcggttgttcacctctttagcccagtcaaacaggtacttgtcggtttcaatccggccgccgttcagatagcatttccacccggtttcagtctgcttggcgtcaatggctaccacacagacctgtgaaccgaaatgtttggcaatcttgtctaccaaatccggattgcggatggctgatgaattgatagaaactttgtcagctcctgcattcaatagccggtctacgtcgctcagttcgtttatacctcctcctacagtaaaggggatattgatattggccgctacccgttttaccaaatcggtaaaggttttgcgcccttcatggctggcagtgatatcgagaaagaccagttcgtcagctccctgttcactgtaggtacgccccagttctaccggatcacctgcttgacgtaagtttacgaaattggttccttttacggtctgcccgtctttgatgtccaggcaaggtatgattctttttgctaacatgatttgcttttacatgaaacggtttaagtctttcaatgtaatttttccctcgtataatgccttgccgaaaacaacagccggaactttggctatttccaggtcgataatgtcctgtatacagcttactcctccgctggctatcagatgcatattcgggaactccttcaggatttgctggtatagttccacggaaggtccttgcaacattccgtcacggctgatgtcggtacataacaccttgaaaaccccttctttagtataatctttcaaaaaagggatcaactgctgctgactttcctctttccagccattgacagaaattttattctcctttacatcagctcccagaatgattttctcgtttccgtattgttccagccattttttgaaaagcccgggatttttcacggctacgctgcccagggttaccatttgtgcgccattgtcgaaagcgatgactaggtcctcgtctgtttttatccctcctccaaaatcaatgaccagagaagtgcggctggcgatttggtctagtacacggtaattcacaacatggcgtgaaactgctccatccagatcgacaatgtgcagacgatgaatcccatgggcttcaaattctttggcaacctcaaccgggttttcgttatatactttctgtgtgttataatctccttgagaaagacggacgcatttgccatcaataatgtcgatggcaggaattaactctatcatatctatttcttcttatacattgttatatataatgtaatggttcacaattctaaaaagttcctcaggattcgttcgcccacggctccgctcttttcgggatggaactgtgtcgcatagaaattatctttgtgcaaggccgaactgtaggggaggatataatctgtttgtgctgccgtaaactcgttcagaggcacatagaagctatgtacgaagtatacaaattcttctttggtgaatcctttgaacaggtcgctgcgtacatgagtcagggtgttccatcccatatggggtactttgtcttcatgccgggtggggctgaacaactttacatcagtatcaaagatgcccaagcagtcagcatttccttcttcggagtgccggcacatcagctgcattcccaggcagatacctagtacaggttgttttaagtttttaataacttcatccaaccggtttttccggagatggctcatggttgtttcggcttcgcccacaccggggaagataactttgtcggcactcatcaatacttccttatcggaagtgatggttgcttctactccaaggcgcttcagtgcatagtctacggagtagatgtttcctgcattatattttacgacagcaattttcatcagctaaagataactgttttatttttataagccaatacttttcgttcaatatgtttctgaacagcacgagaaaggactattttttccaaatctttacctttacttactaaatcctgcacagtgtccttgtgtgtgatgcgtactacatcttgctcaatgataggaccggcatccagttcggaggtaacataatggctggtcgcaccaatgatttttactcctcgttcaaacgctgcatgataaggttttgcaccaacgaacgcagggaggaaagagtggtgtatgttgatgatgcggttgggatatgcttcaatcatttgttcggaaatcacttgcatatagcgtgccagtacaatgaaattgatgttatgtttttccaatagctccatttctgctttttcctgttccattttgttctctttagtaatagggaagagatagaacggtataccgaaacgttctgccacatgctgaaggtcgggatggttacttataatcagcggaatttccacattccattctccggccgtgtagcgtgccagcatatcgaacaggcaatgggacagtttggaaacaaatatggccattttgggttttacatccgagaaataaagacggaatttcatttcatatttttgggcatacaaggtttcaaaataatcttctattttatttttaggaataaagaaatcctttatttcccattctatacgcatgaaaaatatattttctacatggtccacatattggtctaagtagacaatattacctttgttaattgtaataaagtttgtgacttctgccaaaatgcctggttggtctgggcagtgcaacaataattttgcagttgtattcatctttttccctaattttcgattttaatctattgagtgcacaaaaatagcgaattattgccaataagctaaattttataacaagaagtttgttgaaaagattaaaataataacaatatcgtaatttttagggtggggaggtgaagggagttggaaaatattttttttatggtttttgccaaaacgcttgcagatttaaaaataatgcgtacctttgcacccgcaatcgagagagaaagcgtcggaagagagactatcaaaattattggtgcgttagttcagttggttagaatacatgcctgtcacgcatggggtcacgggttcgagtcccgtacgcaccgcaagtttttttccgatttatcaaaattactggtgcgttagttcagttggttagaatacatgcctgtcacgcatggggtcacgggttcgagtcccgtacgcaccgcaagtcttttttgatttattaaaattattggtgcgttagttcagttggttagaatacatgcctgtcacgcatggggtcacgggttcgagtcccgtacgcaccgcttctcaagaaagcaaaattaggaaaagctctgattctcaacggaattagggcttttttgtttgtttgaggtgaagcagaatgtagcgtttctgagaagtatgtcaggtgcaaattctgttgcttttttagggctactgaaaaatgcaactaaaatgcagatatttctctgaatttccttattttataaggaagtgccttgctccatatttattgcgtttgtaacgctaaaaacagaataggatgaaactaaggtgcaatgaaagttttgttcttcgctctgaagagcagattgttgaaaaatggtgaagcacctattattcttcgtgtgacaattgacgggcaaagtgaagatgcccgtatccaaagaagtgttcctctaaagatgtggaataatgttaagggatgcagcaaaggtaaagaccgggcgtcggtggaactgaactgctatattgagtcgctgacagtccgtttataccagattcacaaggaacttttgtgtcaggaggctttggtaattcctaaacatcttttggtgaagctgttctctaaagaggaacgtcgtattgttttgggtacgatgaagaagtgcatggatgactggacggcattaatcggcaaggaatatcagaaatccactctttcccgttatgggaactgctatgaattgctggagattgtaatccacgaattctacaggaaagagtatatttccttcaacgagttgaagggtgagtttattgatgcttttgaaatgcacctgcggatagtgagaaaattgtctcagaatacgctgaccaaatatatgagctgcttcagaaaaataatgtatcaagatgaattattgttgatgtggaaatatataaaaaatcatgcagtcaatgtgctaatttaaaatagcttcttcttttgtaagcctgaaaccgtacttattgcttgttccccttgtatttttttagtggatcggttatcgctatatcgtacttacattcaatcttatcggtttggtaaaatgttagtttgaaataaaaatgatttcatggatgggggtaaaacggaactttgttgtcattctgtcaaaaaatgaagttgttatgatgaaaaagattatagcgacacgatagtataaactatagaattactaactttaatttatttttcaatgaaaaaagtattattatttgctgttgttttttcttgtagcatgtgggctaatgctcagcgtgttacatgggcaaccgaagcagggttatctgcaatacaaagaactgggtatggagaatgttggcgtccatccactcgtttagggatatctgcagattataatgttaataatatgttctctatgaagtcgggattatattatacttttagaggatactctgtgaataatggcggaacatatagtaatggagatgctacatggatagaaaatgtttctcagacaaggcattttttacaagttcctattttagctaaattctctatccatagcaacaattccactaaatttttctttgagataggatcatatataggatattgtataaaaaatcatattgacagcaatccatattatctaactatgccttcttccggttgggttgaaggatatcctggtgtgggagaaagtgcggagggtggtagcaaccagtttctatatcagcatgcgagaaatttcgactggggaatgacatctgctgtaggtattgaaaatcggaggtggacggttaagcttcaatatgaaatgtcacttgggaaagaatctaaaaatgataatataggtgtgaattataacagtttaaccctctctgttggttataagctaaatgtaaaacaataagataatatatcgttggattttatatttgtaattatatcggtattttttagcatgcttctatacgaaatattataagaaatgcttggaaaaatctttgagaggatatgtgttgatttattattttgcttataatatatgccgctgtgaatatcagaagaaaagttattcatggcggttttgacttttacctttttcgtattcaactattcttctgtgttttagttgctctctcaagttttttgcctatttttgctgttggaacataaatcaaagtataataataaaaatacatatgaaaaacctcagaagaactttcaccgtattatttgccgcagctttcagcatgcaggtgttggcacaaagagaagataagcttatcaatcaggattggagtttccgtttttcccatcaagtaaatgctagtgctgcacgtagggtagacttgcctcatacttggaatgcgcaggatgccttgggtggtaagcacgattacaagcggggaataggtaattatactaaaaagatattcatccgtcccgagtggcaaggcaagcggctttttttacgtttcgagggggcgaattgcgtgagcaacgtctttgtaaatggtaaacatataggtgagcatcggggaggctatggagcttttgtcttcgagataaccgataaagtggaatatggaaaagagaatacattgctggtacgtgtcaataatggcgagcagttggatgtaatgccattggtcggtgattttaatttttatggcggcatttatcgggatgtacatctgttgctgactgataacctgtgtatttctccgttagattatgcatcgtctggggtttatctcatacagcaacaggttacggataaacaggcaactatttgtgcacgcgtaaatctttctaatggaacgggagaactccggaaagtagtgctccggttgcaggttaatgacgggaaaaagactgtgtatgaaacggagaaggaagtaagtatgattcctcatacagatgtacaggtagagaatatagagttcatactgaagaatccgcgtctttggaacggtatgcaggatccgttcatgtatcaggcggtggtgactttgattaaagacggaaaagaattggacaaagtggaacagccgttagggttacgttattacgttacggatcccgataaaggttttttcttgaatggaaaatacttgccgctgcatggtgtatgccgtcatcaggagagggcggaagtgggtaatgctctttgtccggtgcatcacgaggaagatactcgtatcatgcttgatatgggggtgaatgctgttcgtctggcacattatccgcaagctacctatatgtatgatttaatggataaacatggtattgttacttgggctgagattccatttgtggggccaggaggatacgctgataaaggttttgttgatcagccttctttccgtgaaaatggtaaagagcagttgaaagagatgatacgccagcattacaatcatcctagtatctgtttttgggggttgttcaatgaattaaaagagcagggagacaatcctgtagagtatataaaggagttgaatgctatagcgcatcaagaggatcctactcgtcctactacttctgcaagtaatcaggagggtgcgttgaatttcattactgatcatatagcttggaatcgctatgacggatggtatggggctacgccggctacgcttgccacatggttggatgctactcataagaaccatcccgaaatgaaaattgccatcagcgaatatggtgcgggtgctagtatctatcatcagcaggattcattggtacaaactgttcccggaagttggtggcatccagagaattggcaaacagaatatcacattcagaattggaaaataataaacgaacgtccgtatgtgtgggctagttttgtgtggaatatgtttgatttcggtgcggctcatcgtacggaaggtgatcgtccgggcattaatgacaaagggctggtaacccatgatcgcaagattaaaaaggatgcttattatttttatcgggccaattggaatccggaacctatgatttatatcgcggggcgtcgtaatgtgaatcgagtgaagccactcgttgatgtacaggttttttcgaatgtagaagaagtgatattgatcgtgaatgactgtcagtgtggaaagatgaaaccagacagtttgaaagtttgtttgttcaaggatgtccctctcagaaaaggaaggaatgaaatagaagtacgtgccaatgatagtaaaaaacaattgatagatcgatgtacttggatattacaataaaacaattgtcgcagggagttatacatttctttctgcggcgattgttttttattagtttgatttaaccagttggctcatcgtcttgtgttgattctacataatcagaactgttgaaccgtcgttacggtagtgctattttatctccatcccatgttgtgacagatgaagaatgtaacaaccaataaaaaaatgatagaagatgaaaaggttatttattatttaactattgctctttccgttgttcagcgtggcagtatgttttcttaatgatatttctacgctagaaacagaacagttgataatacccgaaaagctaggaagtggagagaaccggggtgatttcgactatccggctgaaaaggtaagatacttgtggtttacttcttcgcgcaaggataacgcaggttgtgggcgagtgtattgtggagtttaccggtgtagatgtatgccgcattgaggttgccgaactgtatgttgaggaatccatacaatgacaacaactgttcgggagcttataacaatttgcaatcaggtatgattaatctgctcgatgcggaaaccttagcgtagcatgatatgattttcttcgattcactctgctagtggtatcaacctgtatggtagcctgtagatttcttgaaacatgcgatttgaaagagtgattggtgatactgtcgtttcttttggggaggtttcgctgccatcgtgcgagggaaaaatagcatccgtcgtggaaatccctgtagaccgaatgacttatcagactagtagatgcctgtttctccaccagtaccatataaatcgggtaccagttgtaattagggctactgacaatcctgtataaaatacagcaatgaatgcttccggtagtaaatgcagggtgcgtgttaaaatacctatggtaatcatgaatgccatgataatccacccttttacatcgaagaaagagaatggacaattcttggctttcttttgagatatgcgatgagtatgtttcttgtaaagtttatgaaatatcagaccaaagaataacagaaatactatggtagcttcacagactttgaagaaccaataatgagaatcgtttatccagcaacttattccaatacgtaagatgttgataccggctaagagccaaactatgcctgctgtaataagtaatgtattttttgttactccgtatttcatgttagcattaaaaataatgaatggcaaagatacgtctttttaatggatcatctgataggtggatagttttttatttgtaaatggaggaataaaacaggtctgtctttttgtataaagagaattatagaatttacttatttattgtctttgatttcgttcttgtcttaaatggtagttttgttttttagtgggtgtggaagtgctgcaagttttgcaagtttgcaagtttgccttccgtttttccgtcttttcttgttttccgtctgctgttttcgtatgggtcccttcctttttccgtccctatacgcgcgtgcgaatattataatgtgtctgtctttttcctccggtgtcctccgttataaaaacatgctttgtaacacatctgttattcagagtattacaaaaaagtttcaggaaatccgtataatttttccttcgtatgtttgctggtaatcgttaaaaggtctacctttgcatccgcaatcgagagagatgcggcacttcagacagtgtgtgactgacttggtgaaacaaacgtaggagagttttccttgacagtgtctgcacccagtatcttaccttagcggggctaagggagcgagaacggataagacgtggggaggatggacgtcccgccttttatggaagtttcgaaaaaaactttttcaaaaaaaactttcgaaaacatttggtgattacgataaaatctcttacctttgcatccgctttcggaaacgatggcaagacataaatgagagttctttgaaagatttaagataaacaaacaagtagtacaagccggtgcaccgtatataatatatatatatggtgtacggaaaaacaagaaccgtcaatattgatattgatagatttggaatccttgagcagattatcaactgaacagttggaaaaagatattattacaatgaagagtttgatcctggctcaggatgaacgctagctacaggcttaacacatgcaagtcgaggggcagcatggtcttagcttgctaaggccgatggcgaccggcgcacgggtgagtaacacgtatccaacctgccgtctactcttggacagccttctgaaaggaagattaatacaagatggcatcatgagtccgcatgttcacatgattaaaggtattccggtagacgatggggatgcgttccattagatagtaggcggggtaacggcccacctagtcttcgatggataggggttctgagaggaaggtcccccacattggaactgagacacggtccaaactcctacgggaggcagcagtgaggaatattggtcaatgggcgagagcctgaaccagccaagtagcgtgaaggatgactgccctatgggttgtaaacttcttttataaaggaataaagtcgggtatggatacccgtttgcatgtactttatgaataaggatcggctaactccgtgccagcagccgcggtaatacggaggatccgagcgttatccggatttattgggtttaaagggagcgtagatggatgtttaagtcagttgtgaaagtttgcggctcaaccgtaaaattgcagttgatactggatatcttgagtgcagttgaggcaggcggaattcgtggtgtagcggtgaaatgcttagatatcacgaagaactccgattgcgaaggcagcctgctaagctgcaactgacattgaggctcgaaagtgtgggtatcaaacaggattagataccctggtagtccacacggtaaacgatgaatactcgctgtttgcgatatactgcaagcggccaagcgaaagcgttaagtattccacctggggagtacgccggcaacggtgaaactcaaaggaattgacgggggcccgcacaagcggaggaacatgtggtttaattcgatgatacgcgaggaaccttacccgggcttaaattgcagatgaattacggtgaaagccgtaagccgcaaggcatctgtgaaggtgctgcatggttgtcgtcagctcgtgccgtgaggtgtcggcttaagtgccataacgagcgcaacccttgttgtcagttactaacaggttccgctgaggactctgacaagactgccatcgtaagatgtgaggaaggtggggatgacgtcaaatcagcacggcccttacgtccggggctacacacgtgttacaatggggggtacagagggccgctaccacgcgagtggatgccaatccccaaaacctctctcagttcggactggagtctgcaacccgactccacgaagctggattcgctagtaatcgcgcatcagccacggcgcggtgaatacgttcccgggccttgtacacaccgcccgtcaagccatgggagccgggggtacctgaagtgcgtaaccgcgaggagcgccctagggtaaaactggtgactggggctaagtcgtaacaaggtagccgtaccggaaggtgcggctggaacacctcctttctggagaggacgaaagatcgataaggtttttgttcttgtactgctggtgttgtttattcaagatatgattccgtaatgatacggaagagagaaagtaagaagccgggtctaattaaacagactaggttgaacttagtcctatagctcagttggttagagcgctacactgataatgtagaggtcggcagttcaactctgcctgggactacgaacggaatcaagttcgggggattagctcagctggctagagcatctgccttgcacgcagagggtcaacggttcgaatccgttattctccactccatcggaaacgtaagaaacgaagatgaacgatctatgacatattgtacaagcaaacagtaattttagtagtaaagagctgaaagtatatatcatcccgccggcacgcaagtgtgggcgaatggataaggaaagtaaagaagggcgcatggcggatgccttggctctcggaggcgatgaaggacgtgataagctgcgataagctttggggaggtgcaaatgacctttgatccagagatttccgaatgggacaacccaatatcttgaagaggtattatcttactatgtaagaggctaacgcagggaactgaaacatcttagtacctgcaggaaaagaaaataaacaatgattcccccagtagtggcgagcgaacggggaacagcccaaaccatccatgttacggcatgggtggggttgtaggactacgccgttgcatgaagacatcagagaagaactttctggaaagaaagaccatagagcatgacagttgcgtattcgaatgttgtcgaagcatagtagtatcctgagtagcgcggagcacgaggaattctgcgtgaatctgccgggaccatccggtaaggctaaatactcccgagagaccgatagcgaaccagtaccgtgagggaaaggtgaaaagcacttcgaacagaagagtgaaatagttcctgaaaccgtgcgcctacaagcggtcggagctcgttaatgagtgacggcgtgccttttgcataatgaacctacgagttgcctttgccggcaaggttaagtgtgacgacacacgtatccgaagcgaaagcgagtctgaagagggcgtatagtcggcagtggcagacgcgaaaccaagtgatctacccttggccaggttgaaggctgggtaacaccagctggaggaccgcaccaataagcgttgaaaagcttctggatgagctgagggtaggggtgaaaggctaatcaaacttggagatagctcgtactccccgaaatgcatttaggtgcagccttgcgggttactgatgtgaggtagagcgactgataagatgcgagggcttcaccgcctatcaagtcttgacaaactccgaatgcgcatcagttctaccgcaggagtgagggcatgggtgctaaggtccgtgcccgagaggagaagaatccggaccacctgctaaggtcccgaaatgacagctaagttaaactaacgaagtctgactgctaagacagctaggatgttggcttggaagcagccattcatttaaagagtgcgtaacagctcactagtcgaggagtcgggcgtggataataatcgggtatgaagttgtctaccgaagcagtgggatcattaatatgatcggtaggggagcattccagtcggcgtcgaaggcgtaccgtgaggtattctggagcgtctggaaaagcaaatgtaggtataagtaacgataaagggggcgggaaaccccctcgccgaaagactaaggtttcctgatcaacgctaatcggatcagggtcagtcgggtcctaaggctcagccgaacggcgatgccgatggcagaaacggttaatattccgttactaccttcaggagtgacgtggagacgcagtagtgacagtgccgccatctgacggaatagatggttgaagggtgtaggagtcgatcatggcaggcaaatccaccatgagatccgaacctgacagtatgccgcgtccttcgggacaaggcaatagtgcgcgtaagcatgctgccgagaaaatccgctaaacttaatcctgcaggtacccgtaccgcaaacggacacacgtagtcgggatgaatattctaaggcgcttgagtgattcacggttaaggaactaggcaaactgaccctgtaacttcgggataaagggtccctacccttttatgggagggcgcagagaatcggtccaggcaactgtttaacaaaaacacagggctgtgccaaatcgaaagatccagtatacagcctgacacctgcccggtgctggaaggttaagaggagatgtcatcgataagagaagcgttgaattgaagccccagtaaacggcggccgtaactataacggtcctaaggtagcgaaattccttgtcgggtaagttccgacctgcacgaatggtgtaatgatctggacgctgtctcaaccgtgagctcagtgaaattgtagtatcggtgaagatgccgattacccgcgatgggacgaaaagaccccgtgaacctttactatagcttatcattgaatctgggcacgtgatgtgtaggataggtcggaggctttgaagcaggtacgccagtatttgtggagccgctgttgaaatacgaccctttatttgtttggattctaacccgtggaacggggacattgattggtgggtagtttgactggggtggtcgcctccaaaagcgtaacggaggcttctaaaggtgccctccggccgattggtaaccggccttagagtgtaatggcataagggcgcttgactgggagactgacaagtcgatcaggtaggaaactagagcatagtgatccggtgtttccgtatggaagggacatcgctcaaaggataaaaggtactccggggataacaggctgatccctcccaagagctcatatcgacggagtggtttggcacctcgatgtcggctcgtcacatcctggggctggagaaggtcccaagggttgggctgttcgcccattaaagtggcacgcgagctgggttcagaacgtcgtgagacagttcggtctctatctatcgtgggcgcatgaaatttgcgtggctctgacactagtacgagaggaccgtgttggacagacctctggtttgccggttgtgccgccaggtgcattgccgggtatctaagtctggatcggataagtgctgaaagcatctaagtacgaagccggccacaagattagatttctcagggtcgttgtagactacgacgttgataggatgcaggtgtaaagatggagacatcaaagccgagcattactaattgcccgtccactttccttatatgtcggatggtgtatacctttggtttttactacagaatgaaattacgataacagctcaacaatatgtcaaccttattcaggtggctatagcacaagggttccacctcttcccattccgaacagagaagttaagccttgtcacgccgatggtactgcgtcacagtgggagagtaggtagccgccgttttgattgaagcccccggacttgaagaagttccggaggcttttttttgtatacgcacgtgtgaaatgtggcctctaccgttttttccccgtgggtgtgggtacctttcccacggaactgtccggaaggctccgccatgtcctttctccggcggaagcggttccggaaaccctcgccgggtactcatgttttaggaatatttattgaatatccctactttaagtataaattagttggctaattttatgatatttattgtatctcccactttagaagatcagcgggagatgcactttttctttttcattgagctgaaaaatcttgctgctatgctaagcataataatacaaaggagttaggaacagtacagttctctttcttatttatgtgtataagctagtgctgctcccaatgccgtgcgatactctgcatattcaggtatccaaaaatggcattggtacatttcttccataactgggaatatttctttgcattgtggcattttggtcaaattacctattaggacaaaatctttaatgtggctattcagtgctgctaatatgacagattgtcctattgattgtaataccatatgaatgattcccgctgctacatcttccatagaggcgtttgaacttgctttgccaaatgtggaagcggtggcatccagaggcagtccaggtagaggggtattgcaaatatccttgatttgcagatcaatattttctattacacctttttctgccatctttaccacttgatgaatattctgtgtttttaacaacaggcgagatagtccttgaatggttcctccgccaatacctataccacctatgtgagatatgtttttacctccttccacttttacaaaagaggtgccggtacccatgcttactacaataaggtcttgcaattgggagtcatagtgagctccaagaccgtttgctagaaactcatccgtatgatcagtagagagtccatataagggttggtttacgtaagcacttcccactcctgtcaacatgactttatcaatgtcgtttaagctgattccattatcatatatgtatttgccgaaagcaccgaataacgaagtgataggatcttcggcttttacaatcataggatgttttatgccttctttatccacacctattatcttggtggtgcttccgcctacgtctatacctattaccattcccattgtttttctttgtttattttaaaatagtgcaaatatacaggaattatctaagtggctattcatatagcttgcaataattaccaattatctgttcggaatggagctacaggcaggcctgatgctccgaataaggtaccatcagtatggttggcccaattgtatcttacggctacaggatgaggtacatcgggtgattgtacaattatttctttcttttttacagttactgttgccggataaaaaatccgatctgtacctgcgattataaatccgcgtactgggtcgggatgcaagaatccttttcctaagttttcaaaatggatgcgaagggtatttccttcgatgctgtagcctttataaaccggatattgaggcatttttctttttccgtaagtttgctttaaagctaactgtgataggcgaagacctgtttccagagtactttggaaggtattgcttttttctttcccaatatcggtggttatcaccatgcctgtatgattcaagtgtaaagcctgtgcttgtgcttcacgcatggccgcccagtctgaatcatcttgtgcttcttcttttttctcatgattgggcagttgcacaaagtagaaaggcatttgtggtttttgccatttatcgcgccagtcggctatcaatgacatgaataagtctgcatattcatcgctactttccaaattactctttccttgataccatataacaccttgaagggggaaagaggtaagcggatgtatcattgcattgaataatcctgtaggatacttagggttactttctggtgaaatgggtacaggggggattccacttaatgagagaccggataggtatttccattctcctgccaatgagataggatctttgccttttacactcagcttcatgtcttctggacggccatatattcctcctttgcttttgtaattggtcacacgtatggtcagtacagcttttccgcgttttaccagcttatagggaattgtgtaatagcgggacgcatcggctttcgtgtttcgtcctatttcagtcccgttataatatacgatgctttcatcggcaatgttccctaaatttattgtgacattttttctagcccagttacgtggaatatctatcgtttttctgaaccacactactccatcgaagtctttcattcccttatcttcccagtatcccggaagttccattgttttccagttttcatccgaataatcaggttccgcccatacttggtggtcatcgcaccatcccatatcgtgttcgtaaagagcttgataccactcttctctttgacgggcatattctgcttctattttttcaggattgaaccccaaggattcaagcatttcagtttctttgttgtaacttggcaggttttctaacgcatcataactggcccatgcttctgcaggagtatctttccaggtacaacttattatacctatgggtactttcaggtttttttgtaactgactggcaaaaaaatatccgattgcagggagtccggttatggtttcagatgtacattctttccaaccttcttgtgtagcatgcaaatctttcttgggaactaaagagatttctttttttgtctgaaacagacggatataaggttgggagggtatatctatgggagtttctgtttcacattctcctgtatacaaccatatttcgccaatcagaatattttgcagtatgtgctcatccccgtccgaaatgataatttcataaggacctccggcagatggggtaggaacttctattttccaatttccttctttgtcaggtgatgtcgtatagggatgcttattccatcccgtttttattatcacttctttttttgtagatgaatggccatgaaaaatgacattcgatttttgttgtaataccatattgtctgtgaataatgcaggcagtgttactttggcctctgccatacaaaatgccattaacattcccaataagatcatttgttttttcataagtgccaagtttgttgtgttattaagtttatagtatttatttatgttgtataagtccccggtctttgaatatgagttgtaccaggcggaaagccaaatcagtaagcaatattcccaaggccgcaccaatgatgacatcaaacagccagtgacggttattcagaatgcgggtaaaccctgtaactatagctgctgcgtatgctactaatcctacccaatatcctttgaatccatattccttatacaatagggtagctgccataaacgctgctgccgtatgtccggaaggaaaagagaaataatttgtggcatccgggcgaagcacccctgtggtgagttttaatccatttactaccagctgcgtcagtacgactgacaagactatgaaagtgaacagccgtttccatccgaaattacctcttattcctcccaatttcagtccgaatagaagtatgagtggaaaaagttgcagataattgtcataagtttgatggaaagccggagcatgtacattacgcaaattacgtatgtatagatttgcattttcgaaaaaatgggagaatgttccgcttccgtcttgcaaatacactgcaataacaagtaatacagctacgtaaaacgtgatgattgccatcattttaatttttcctatcataagtcagtttattctacggatgaatgccccgaaagtactcattttctcttttatctgttaatgcgttaatgataaattttgttcaaaataagtttctttaggaatcttatggtttagtcggttcttccttcatttctcccttgctatatccgctaggacttattttatagtattttttgaatacctcgcggaaatattttacatcattaaacccggtcatatctgatatttcggatatattatactgtccttcggatagtaattgcgctgcccgtttcagccggatcaggcggatatagtctgccggagcttggtctgtcaatgcttttagtttattgtagaaactggaacggctcatattttgtgaagcacagagtgactccacgttgaaacctgaattgtctagattttcagttattgtttcttttactgcttccaggaactgttgatccaatgtgttgctataatttatggaaatgctgtcattgtgtagttccatttctgcatatttgctacgaagtagtgcacggttagtcagtatattggctatggatgcttttagtattcctatgttaaaaggttttatcaggtatttgtccgcacctgtttccaacccttcaacgatattcttttcgtcatttaatgctgttagcagaattacagggatatgagacgtcagtatattattcttgatagcagaacacaattcgtccccccgcatttcgggcatcataatgtccgataatactaaatcaggcttaaattcggggatgatttttaaggcttcttttccattggtacatgtttccacttgataagcttcggataaagtatgagacagatattcgcgtagatcgtcatggtcttccacaaccaggatgcgctgtgcattttgaacatgctgccgatactgatctttataagtgtggggagagactgcactaggggatactggtaccacgttttcttgttgtaccgtttttgtcggaacctgttgacttcggaattgtttttgggggaagataacctttacgcgggtgcctttattctctacgctttctatgctgatctttcctttatgaatacgtaccagtttccacactaacatcagtccgattccactgcctgtaatttttgcattgatggcattgctgcccctgaagtgtaacttaaataactttttctgttctttggcaggaatcccgatgcccgtgtccgtaatctccagactccagttgtccttgtcatggcgggtgataatgtgtacctcaccgtgggcgggagtatatttgatggcatttgaaatcagattttttgtgatcgagtccatcttttctttgtcgaaccatacattttgatattcaaagttgcttttgtagtcgagtttgatctgtttggcttctgcataactataaaaggcatggtatattccttccatataggtattaagttcgtgttccgatatacgaagggaggatgagtacacattggctttgctgaagtttatcagattggtggtgaggcgtatcaaagtgtccacgttcttcatggctgtaagcatattggcctgactttcttcacttaaattttctttttgttgaatttcttccaaaggtgcctttatcagtgtcagcggagtacggatatcatgcgctgtattgataaagaaccgagttctttcatccgaggcctttttttctctgcgcatggaatgaaggcggaaaatgacgtatgttgctaaaatgatagtcaggacataaatacaaatagcccaaaaactgagccacacgggatgtgctacagttattttcaatatccgctcctgcaacacgtgtttattatcctctttggaaacagaacgtacacgcagtgtataggtgccgggagcaacattagtaaatcggatagttccttcgtcactgggagtagtccagccatcgtagaatccttccaactgccaggtatatagtatgtccgacggataatcgtaattgatagaggatactcggatggaaaatgtattttgcatatatttcagattcaatttctctatttggtcgatatctttagtcagaggagagtttggatcattgggatatacagtttggtagaaaatacggaaatcgctgaatatcatatgtgaatctcctgttttgggcatctctatgtttggggggaattccagtgcaccgtctgtacttccgaatacggtgttcccattggcacgtagtacgccggagccggcattgaaacaggtggacatcaacccttgtccgcgagtccagttgcggaactggcggttggtaggcgagaaaatactgataccattttcggtactcatcaagatattcccgtcttttgtgggtagaataacataaatgctgtttgatactaacgggctgtttcctgtatggtaatgggcgctgattgattcttttaccggatcataagtaaatagtccggaaccactggtgccaatgtagagtaaaccattgtcttcttggtgtaacgtataaatgtaggttgctccaccgggcagaggtatttcatggtatttgcccgaattccggtctagtagaaaaagattggtggaggtacctatccacatagatgtactgtccttttcttcaatggcagtaacagaacctagtccgggataaagacgtccttggcgtgtcttcagattaaagcatttcagattataatatcctccggaccatatacacccgtatctgtcctttttaatgtcgcgtatgtatttgtcggcacgtacattcagatggaaggattgggcaggggtgaggtattctatgtttccgtttttcttggtaatctggaaaatgcccgatgcatatcctcccgcccatataatacccggagagacttcgcataaagtaataaaaatgcggttctgattttttagtccgtgattgaaagagcttaggaaagaacgccattgcttttgttttgaatcgtataagctgatgccgttgcttgttccaaaccacagatccccgtcactgtcttctataatggagtttacttggttgtttactagtgactgccggttgccaatagagtgctttatccagttgtagttggtatattggttattgcggacggtaattcccgtaggatagttggacagccagatacgctgctcgttgtctacatatacatcattgataatgtttccgtccatttcgttgtaactaccatagttcgcaatgatataaggatctgtttcataggtgtctatgtttaacttgtgtactcctgctccttcagtggctactaataactcctttgtgttcaaaggactgatccgtgtaatattcacatctgtcagttctacttcgggacgtacaattttctggctgttcaagtcatatatatagactcccttttcaaaagtgcctataaacagtttgttggctgtacggtgtagatataattcatgtacgtgcatatccatcattcccagtttgccgcaggagagctcttttaaattcccgttttccagttttgccagatagattcttttgtctgtacctataaagaaatgttcactgtttatctgttctatgcaggtgatatttcccagtcggttagagattcgttgcttttgtccggattctatgttaaaaaggtggatagccgatttgccgcacagccatacgttatcctcctggtctatgtaactatatctcacgaaagcatggtagtccttattccagtaattgtacatactgtatatctgtacaaaacggtcgtggcctgaatcataacgaaaaattctgccttgttttcctgtgaccagtagtgtacctgttttatctaaaaaagtccagtttatattcaataacgggtctagttccctgttaccttctcttaatttataatgttttatttcttttccgttatattggtctatccccacatgggtaaggaaccacatatatccacgagcatctttctgaattttgtatattttctgattgcttagtccttcttctatgccaatatatttataagtctgcgatgagacggttaatgacagtagtaaaaaaatgagacttgtgatagtagctttcataaaactctttattctaaatcttttcttttttcaaaaaacagtaacaaaattaagataaaaaaatcataggattagtaatttgagatgagctaaatttcggtaaaattatccctttgttcgcctatggctcgcttgtgtgaatataagaaatataaatagaagaaggtttgtaacataactgtcagatgattatgttttcttaacaaaacttcgtgcagcattatggtatggcctgcatttctttcaatagaaaggacttataaactagaataattaactaagtaaagaaaagcacaatgaaaaagttttttggttttaataaattgcttgcgtctgtagcggtacttgcttctgtgatgatctttcaatcctgtttggatgatgatgataatgattattatagatatgcgttgcccaatgcactggttacagtgaaaccggtggccgacaattcattttttatgcagttggatgacagtacgacactgttacctgtcaatatgaaaaattctccctatggtgagaaggaagtaagggcccttgtaaatttcgatccggtgaatgagtcaagcggagagtatgacaaggctgtacatatcaactggatagacagtatcttgacaaaaccgattgccggtgatttaggagataagaatgatgaagtatatggtactgaccctgtagatatgattaacgattgggtaacaattgccgaggacggttatttgactttgcgtttcagaaccatgtggggaaatcgcagtcaagctcattttgtcaatttgttgatgagtaaagatgctgaaaatccttatgaggtagaattccgtcataatgcttttggtgatgtatatggtgaacctgccgacggactggtggcatttaatttggattccttgcctgacactgaaggaaaaacagtgaagctgaaattaaaatggaaatcatttaacggagagaaaactgcggaatttgattattgtacccgtaagtcaactcctgcaaacagtgcagccattacagccggacgaagtgtcttgagattaaaataaggtttaataactgaggtgcaatttcaatccctcctgttctatgtggtatagagccggagggatatttttttgctttattcgctcatccatatccctagcattactccgaggatacccaataccacactaccgatgatgtaggtgaaaaaagaggggtagagtcctgatttcagtaattgcagactttcgttgctgaaagtggaaaaagtagtgaagccaccgcaaagtccgatagtgagcatcagtcttatatcattgttgatatgaatgcgtgaggtgagggtatagaataccccgatcagtatgcaacccaaaatattgactgcgaaagtaccccacggaaaattcgttgttccctggcgataaatgcttatggtaagcaggtagcgaagtacacttcctgtacctcctcccaagaagatgagtaatagtgatttcataaatgctacattttaatgcaaaaatagcaatgattattcattcagagccaaacttttttcgtaattttgcaccctaaacgaaaaatacgcaaaaaggaatgggtggtttttttggaacagtctcaaaggctgaatgcgtcaccgacttattttacgggacggactataattcacatttaggaacaaaaagaggtggtttggctacgtatgcccaaggagagggatttatgcgttctatccacaatttggagagttcttatttccgcacgaagtttgaatctgaacttccaaagttcaaaggtagttcgggtatcggcattatcagtgatacggacccgcagcctatcgtgataaactcgcatctgggcaagttcgccatcgtcacagtagctaaaatcaataacattacggaattggaacgcgacttgctggcagctaatatgcacttttctgaaatgagtcttggcaagacgaatcagacggagctgatcgcattgcttattgtgcaagggaaaaattttgtagatggtatagagaatgtctttaataaaatcaaaggatcatgctccatgctgatattgacggaagatggtattatagcagcacgtgacaaatggggacgtactccgattgtgataggtaaaaaagagggtgcgtatgctgcgacaagtgaatcaagcagtttgccgaatctggattatgaaatagagaaatatgtaggaccgggcgaaattattcgcttgcgtgccgacggaatggaacaaatgcgcaagccgaacgaaggaatgcagatttgttcttttttgtgggtatattatggatttcctgtttcatgctatgaagggaaaaatgtagaggaagtacgttttatgagtggttataaaatggggcagaaggacgattcggaagttgattgtgcctgcggtattcctgattcgggagtaggcatggcattggggtatgctgaaggcaaaggaattccttatcatcgtgctattgccaagtacacacccacctggcctcgtagttttactcctgccaatcaggaaatgcgttcactggtagcaaaaatgaagctgatacctaatcgtgcaatgctggaaggtaagcgcgtgttgttctgtgacgattctatagtacgtggaacccaacttcgtgataatgtaaaaattttatttgattatggtgccaaagaggttcatatgcgcattgcttgtccgccattgatttatggatgccctttcattggtttcacttcttcaaaaagtgatttggaattgataacccgccggatgattaaggagattgaaggcgatgaaaataagaatctggaaaaatatgcaacgacagattcgccggagtataagaagatggtgcaaatgattgccgaccgcttcggtttgagctccttgaaattcaatactttggaaactttggtagaagcgataggattaccaaaatgtaaggtatgtacccattgttttgatggttccagttgcttctaataacaaaataataaaatattaatgaaaaagagccgtgatttgtttggcaattcacggctctttttctatttttacaggcaagtatgaatattaaaacaaaaagaaaaatgacggtaatagaacgatttttaaaatatgtaagcttcgacactcagtctgatgagaatagcggggctacccccagtacaccgaagcagatggtgtttgcacaatatttaagatctgaattggaacaattgggctttcaggaaatttctttggatgagaatggttatctgtttgccacatggccggccaatacggataaaccggttcctaccatcggatttattgcacacatggataccagtcccgatatgacgggtgcgggagtcaccccacgcattgtctatggttatgacggaacggatattgtattatgcgaagaagacaacattatactttctcccaagcaatttcccgaactgttggatcataaaggggaggatcttattgtaaccaacggcaaaacattgttgggagctgatgacaaggcgggtattgctgaaatcatctcagctatggtatatttgaaagaacatcctgaaatcaagcatggaaaaattcgtgtgggatttaatcctgatgaagaaataggcttgggtgcacataaatttgatgtggagagattcggatgcgagtgggcatatacgatggatggtggtgaagtaggggagttggagtttgaaaactttaatgccgcttctgcgaaagtgattattaaaggacgtaacgtacatccgggatatgcaaaggataaaatgatcaactccttgcgtgtggctaatgagtttgtgtctttacagcctacggatgaagtgcccgaatgtactgatggttatcagggattctatcatttgattggcatgacgggtgaagtagagcagactaccatctcttatataatccgtgatcatgaccgtgccaagtttgaggcatgcaaggaaaatatgaaaaagtgggcggaaatcatcaataagaaatatggagaaggcaccgttacattggaattgaaagaccagtattacaatatgcgtgagaaaattgagccggtgatgcatatcattgatatcgctttcaaggctatggaagaggcgggcgtgacacctaaggtgaaggctatccgcggtggaacggatggtgcacaactttcattcaagggattgccttgtcccaatatttttgccggcggcttgaattttcatggcagatatgagttcgtgccaatccagtctattgagaaagccatgaaagtggtggtgaaaatcgctgaattggtggcaagataagtaatttattaaccttaaaatagtaaagtaataacatgaaaacaactccgtttaccgaaacacacattgccttgggggcgaaaatgcacgaatttgcaggttataatatgcctattgaatattcgggaattattgatgaacatcttactgtatgtaatgccgtaggtgtttttgatgtatcccatatgggtgaattttgggtaaaaggtcctaatgcgttggagtttttgcagcaagtgacttcaaacaatgtggcaactttgcccgtcggtaaagcgcaatatacttgtttccctaatgaggagggaggtattgttgatgacctgttggtgtatcactatgaatccgaaaaatacttgttggtggtaaatgcggccaatattgagaaagactggaactggtgtgtcagccataacacagtgggtgcggaattggaaaatgcatccgaccgtatggcacagcttgctattcagggaccgaaggctatggaagttttgcaaaaactgactccggtcaacttgtctgaaattccttattatgcttttaccacaggtgagttcgccggtcagaaagatgtgattatttcgaataccggttataccggtgcaggtggtttcgagctttatttttatcccgaagctggtcaggctatctggaaagcaatttttgaagcaggtgctcctgaagggattaaacctatcgggctaggggctcgtgatacattacgtttggaaatgggcttttgcctgtatggtaatgatttgagtgataccacttctccgttggaagcaggattgggctggattaccaaatttgttgaaggaaagaatttcacttcacgtgctttacttgaaaagcagaaagccgaaggattgaaacgcaagctgattgcttttgaaatggtagaccgtggtattccccgtcatggttatgaactggtaaatgctgatggagagaaaataggtgaagtaactagtggaaccatgtctccaatgcgtaagattggtatcggtatgggatatgttcagaccgcttacacagcattaggtactgaaatatttattgatgtgcgcggacgcaagctgaaagctgtagtagtaaaggccccgttcagaaaataaatcgaaagccggaaaagagaacgctgataacaaagaaaacgcggatattcaagaaatctgaatattcgcgttttctttatatggctgatatacatttacggttagttccttttcataaaaacagcttttaatgcaaaattaataataggatgaagaatatgataaatagataattcttaattttgcaatcaaaaatttattagctatgtctgaattggctccattgataagtgatttggctttgattctgatctgcgccggtgtcatgacgctcgtctttaaacggttaaagcaacctcttgttctcggctatatcgtagccggctttttggcaagtccccatgttcctcttactccgtcggtcattgatgtggccaatatccatacatggtcggagattggtgtgatattcttgttgttcgctctagggttggaatttagtttcaagaaactggtgaaggtaggggggacggcggtcattgcggcgtgtaccattatattttgtatgatattggttgggatttttgtagggtggtctttcgggtggcaacgcatggactgtctgtatttgggaggtatgttggccatgtcctccacgactattatctataaggcttttgatgatttgggattgaggcagcaacggtttgccggtttggttcttagtattttgatattggaagatatattggctattgttttgatggttatgttgagtacaatggcagtgagtcagaatttcgagggcagtgaaatggtatatagcattgccaaattattattcttccttatattgtggtttgtggtaggtatttatatcattcctacatttttgaagcgttcccgcaagtggatggcaaatgaaacattgctgattgtttcgctggcattgtgcttcggtatggtagttgtggcggccaaggttggattttcggctgcgtttggagcttttataatggggtctattttggcagaaacggtagaggccgaaaatatagagaagcttgtggcccctgtaaaggatttgtttggagccattttctttgtatctgtgggaatgatggtagaccctgccatgattgtagaatatatatggcccattgtgattattacattggccattctgcttgggcaggttatttttggtacaggtggcgtgattttgtcgggacagccgttgaaagttgccatgcaatgtggcttcagtctgacccagattggtgaatttgcatttattatcgcttcgttgggggtaagtctgaaagtaaccagtgatttcttatatcctattgtggtggctgtttcggtcattaccacatttctgaccccgtatatgatacgtttggcgatacctgcttatcatatagtagagaaacgtctgcccggcaaatggaaaaaaatgcttgagcgttattcatcgggatcacaaacggtgaatcatgaaaacaattggaagaaattgttggttgccatagctaggatcgtagctgtttattctgtattgtgtatagctatgattacactttcattccattttattattccattgttccgggctagtctgcctgtcttttgggccaatctggcaggaactgtttttactatcgtctgcatcgcacctttcttgcgtgccattatcatgaaaaaaaaccactctgtagagttccaggcgttatggcaggatagccgtttcaaccgggctcccttaatttctaccattttactccgtatagtgatagctgtcatgtttgtgatgtttgttatagagaaactttttcagacttccacgactttgctgatcggtatagccgttgttttggtaggtatgatgatgttctcgcgatggctgaagaagcaatctatattcatggagcgtacttttattcagaatttgcgtttcagagatgtgcatgctgagttcacaggtcagaagcgtcctgagtatgaaggacatttgttgtcccgcgacttacatctttcggattttgagatacctgcggattccttatgggcgggatatacattaagagagctgaatttggggcataaatacggagtacatgtggcatctatcattcgtggaatgcatcgtattaatattccgggggcgaatgtacgtctgtttcccggtgacaccatacaggtaatcggtacggatgagcagttgggcgagtttgcccgtcaggcagaaagagtatcagccgccgctgaagaggaagatttggaaaggcgtgaaatgaatctgaaacagttcattatagatcgtaactcatttttcttgggtaaaaatatcaaagaaagtggtatccgggatgagtacaaatgtctggtggtaggcgtcgaaaaagaagatagtacgctgatgacccctgatatcaatgtaccttttacggaaggagatgtggtatgggtggtaggcgaacgggatgatgtgtaccgtttgttgggtaagaaagaaaaagaggaagaataattaattttaatacataagaaaaccatgaaaagtgatcctaaagattgtctgtattgtcagaacaatgagacattgcacaatttaatgattgaaatagcgccactgagtgtttcacgcgtattcctgtttaaggaacaaacctatcgcggacgttgccttgttgcttataaagatcatgtaaacgacttgtttgaactgagtgatgaagaacgtaatgcatttatggcagatgtagcccgtgtgacccgtgctatggacaaggctttccaccctgaaaaaataaattacggagcatatagtgacaaactttctcacctgcattttcatctggctcccaagtatgtggacggacctgattatggaggtgtatttcagatgaatccgggaaaagtttatctgactgatgcggaataccaagaaatgattgaagctataaagaaaaatctgtagtagtgaaatgattaacagatagatagtagttaatggctagtgattaatagcagatgcgtacacctacaatcactaaccattaatcactatctattcttgttcttcgaaatcaaattcaaagtcgaagtcatcatcaccgaaatattcaggagtaatgaattcttccatgctgcgacggtccttcttggtgggacgccctgttccgcgggcgcgatcaacaaaaccgctgattctgctcatttccagtaattcatattgctccggagtcgttacattctccagaatttcaggaaccaatttggcacctatacgtttctctattgcctgtaaaactttaaatgagtacgtgacaggcggtttctttacctgtatcacttctcccggctttatcattctcgacggcttcacctgagtaccgttgatggaaacccgtcctttcttgcatgcttcggcagcgatagtacgggtcttgaatatacgtgaggcccacagccatttatcaattcttgcttcagccattactttttattgtattggttcattgttatactgatgcctgccagacaaaaactcttaattatgtcgcaagccgttgctacacgttcgtccatggtcttcaaatcttcatcagtgaagtgacctaatacaaaatctatttgtccgccacggggaaaatcgttgccgataccaaagcgcagacgggcataatcctgtgtacccagcgtagcagctatatgtttcaaaccattgtgtccggcatcgctgccttttcctttcaggcgtagtgtaccgaaaggaagggcgaggtcgtccaccactatcaacacattttccaacggaatgttttctttctgcatccagtagcgcactgcatttccactcaggttcatgtaagtagacggtttcagcaggataagctggcgtcctttgagcgagagggtggcagtagccccataacgtccgtcggtaaaaacaagattggacgcctttgcaagggcgtccaatactgtgaatcctatgttgtgacgggtatttcggtattcttcacctatattacccagtcctgtaatcaaatatttcattgataaggattaaaaggttactgattatttgccggcagttgcagcagcaccacgagcggcacgagtcaatttaactgcacaaacaacggcttctttagcgttaatcaattccaaaccttcatagcttaattcgcccactttgacagtcttgcccagacccaaagaagttacatcaacaaccagacgttcaggaattacattgtataaagctttcactttcagtttacgcaattgtaatgccaatttaccaccggcacgtacaccttctgccaaaccttccagctgaacaggaacttccataacgatgggtttagcttcatcaatctgatagaagtcaacgtgaaggattgcatccgttacaggatggaactggatatctttcaaaatagcgtttactattttaccgtcaatgttcaagtctacaacatagatgtgcggtgtgtataccaagttacggagtccttcggtgggcacggagaagtgagtagctacgggcaagccgttttcgtctttctgcactccatacaatacacaaggaacaccattgttcttacgcaattcgtgagttgctttctttcctacgtctgttctgacagtacctttaatttcaattgatttcattgttttttaattttttgtgttactctaaattaagttgatcttattgcttaattcgccatcacacgatgtggtatatcacacgatgagcttgaaaaagcggtgcaaaattactgcttatttccgacttgacaaaaagaaagcacaatttttttatcattgtgctttctttatcggttggaatcagaaatcgatatctattttaatttcattcggactaagcggcttgtgagcgtcttcggtcgtttcctgttcttcattttcagtgtgatgaggttcaatcggaccttgctcttcggcaataaactgtatagcctgttgtaaaccgttcatgaacttctcaaaatcttctttatatagaaaaatcttatgtttttcgaagcttacttgcgagtcatcaccttctcccgaaacaatcttcttgctttcggtaatagccaaaaacatttcatcttttcggtttttcttcacatctaaataataaatacgtttgccggctttaattgcttttgaaaaaacaatttctttgtcaccatccactacacttttctttttataatcttccataacttaagtatctttataaatcggcttcaaaattggacattttttttaaatgggcaaagaatttgcggataaacttcgatgaaaaaagcgatttagatagctctatgtaaattttacattaaaaaatgtaattatgttatgtaaaatcaatgaaaatacctacttttgcaactccttaataattttatgtgaattatgataaatagagttcttattcgtcttaagatagttcagatagtctatgcttattatcagaacggaggcaaaaacttggatacagcggaaaaagagttatttttcagcctttctaaagcgtatgacttatacaactatctgctgcttttaatggtagaggtaactaaacaggctaacaaacgactgaatgctgcgaaaaacaaactggtccctactaaggaagaattgtttcccaacaccaaatttgtggaaaaccgctttattgcacagctggaggtaaacaaacagctgctggagttttcgaacaatcagaagaaaacttgggagaatgaagctgatttcgtaaagactttatgtgataaaatcttagaaagcgatatatataaggaatatatggccagtgagacttcttcgtatgaggaagaccgtgaattgtggcgcaagctatataaaaatattattttcaataatatcgaactggatcaggttttggaggaccaaagtttgtattggaatgatgataaggaaatcgtggatacctttgtgttgaagaccatcaagcgtttcgatgagaagaatggtgcaaaacaggaattgttgccggaatttaaagatgaggaggatcaagacttcgcgcgccgtttgttccgtcgtactatcttgaatgccgattattatcgtcatctgattagcgaaaatacaaagaactgggatttagaccgtgtggctttcatggatgtggtcattatgcagatcgctttggctgaaatcctgagttttcccaatatcccggtcagcgtttcactgaatgagtacgtggaaatagccaaactgtacagcactccgaaaagcggtggctttattaacggtactttggatggaatcgttaattcattaaaaaaagagaataagctaacaaaaaattaatatctttgtttgttattgaagaataacggtattataaactaaaaaacatagaaagtatgaacttattatttgtatttctgcaggcagggggtggaggagattactctttccttattatgatggtagccattttcgctattatgtacttcttcatgattcgtcctcagaataaaaaacagaaagaaattgctaatttccgcaagaacctggaagtgggtcaggaagtgatcactgcaggtggtatatacggaaagataaaagaaatagaagataatacggttgttttggaaatagcgtcaggcgttaagattaaaattgatagaaattctatcttcgctaatgctgcatccaaccaacaacaggcaaagtaaatgacataacaacatgttcgacaaaaggaacatacgtatttactatttaaagactttagagagaatcagaagcttcctgcttagccgtaatagcagggagttcctgattttcttgttttttgtatttgtatctttctgcttttggttgcttcaggtgttaaatgatgattatgaaacggaattctccgttccgttacggttgaagaatgtacctagtgatgtggtgctgacctccgaacttcctgacgaactgcgtattggcgtgaaagacaggggaactgtattggctaactatatgctgggacagacattctatcccattgttgtggactttaaggactatgaggataaaggaagtcgtgtccggattccggtttcagctttaatgaaaaagatttcggtccagttgaatcagacaaccaaattgctgaccatacggccggatactgtggagtttatttatacaaaagggaaggcaaagaaggtgcccgtgaaattgcaaggcaaggtggctttggaccgtcagtattatatctcggatatcatttactcgccggattcagtgatggtttatgctcctcaagagattttggataccatcacggctgcttatacacaggcattgaactttgaagatgtggcagacaccgttcgtcgcagggtgaatctggccgatgtacgtggagcgaaattcattccctcttttgatgatgtgactttattggtagatatttacgctgaaaaaagtgtggaggtgcctatacgtggcatcaattttccgcccgataaagtacttcgcacttttccctccaaggttcaggtgacttttcaggtaggtctgagtcatttcaagtccatcacttccgaggatttctttatcggggtgacttatgagtctttgttgaacaataagggggagaagtgtccggtcaatctcaaatccatcccccgatatgtgaaccacgtccgtttgaatcccaaggaggtggattatttgatagaacaacgaattaaattcaatgattaagatagcggttaccggtggcatcggcagtggaaaatcatacatttcccatttgctggagaatatgcatatcccagtgtataatgcggataatgaagcgaaacgccttactgtttccgatgccggaattcgtggggaactgattgctttgttaggtgaggaggtttataaggatggtctgttaaacaagccgttgctggcttcctatctgttttccaatccggcgcatgtgctccaaatcaattccattatccatccccgggtacggaaagattttaccgtatgggtggaacgtcaggaaaagtgtgagatagtgggtatggaatcggctattttgtatgaggccggttttcaggatacggtagatgcggtaataatggtctatgcacctgtagaactgcgtatacagcgtgccatgtatcgtgacggagccagcgaggaacaagtccgggcacgtattgctgcccagatggatgatgaagaaaagcgtcggcgggccgatttcacggtggtgaatgacggggtgcaattgctcataccccagttgaacagaatagtagaacaattaaaaaccgaaaaattcatactataaatttgggagtttcattggtgaattgtacttttgcttcctcaaaccataaatataaaatagaatagtatgttaaagaccattttatcaatcgcgggcaaaccgggattatataaattgatttctcaaggaaagaacatgttgattgtagaaacagttgacgcggctaagaaaagagttcctgcttatgctcatgacaaagttatctcattggcggatattgctatgtacacagatgcagaagaagtgcctttgagcgaagtgctggaagcggtaaagaagaaagagaatggagcggttgcttctatcaattataaaaaagcatcagccgatgagttgcatgcttattttgcagaagttttgccaaattatgatcgtgaccgtgtccataacggagatatcaagaaactgatttcatggtacaatattttggtaaacaatggtattactgaatttgtagaagctccggcagattctgctgacaaagtggaagaagctgttgctgaataattgaaataaagcgaaagggaaaggcctgtcaagtagattgtaaactgcttgacgggctttttgtttaccggcattattggtaaaaaaagtatgtgtacttcattggcgaaataacaccacttactttgccgatgaagtacacatactttgtctatgaacatatattacctttttcagtgggatacggtcgtttataatgccctgtagagaatatcctgaaaaatccttcataagcttcagcccctccgcaaacaccctgcccgtcggcattccggctgaaggatatacctcacgaaatgtttcagccggaaaatatccttcagaacaaccactcctccgaaaataaaaccggctgaaacatttccacttggctgaaggattccataacctcaatccttcagccggaatgccgacgggcagggtgtttgcggaggggctgaaagatctgaaggaaaaataaggcgtttcggcatgtagataccgttatggaaaaaaacaacaggtcaaattttaaaaagctcttgttctttcaatgaaaacgtcttgttcttttttttaaagaccttgttcttttcagaaaagaacaggacgtttgagaggttagtaacctgcatgccggaaagttagtaacgtgtggggcgacacgttactaatgtgtgggctgtaagattagtaatgttacaggtgaaagattatatatcttacaagtgatacatatcatacaggtatgaagtttcagtatatgtttgataataaaacagtaggttatctttttttacgattatccagttcaatgaactcttttcggatgaataagtttcttatgtttttcaatattgtaaaaatataccagtctacacaggctgttctgaatcttgccgtatttcagttttctttttcttatacaaaaatgaaaaaaggaagtagagatggctgattaaactgttttatgagcttattgccgttttttagctattggaaacatattggttaaggaaatattcaaaatattgcagatagagggctatagttaacgaaaaaaggggtgcatgatgaacaccccttttgcttagtaaagataagaccttatctttactggttgtttgtaacattctagttgcggaattttaatccgtcacccgctgtttctacgataatcggtttgcttcggtccacttcctgtgacaatagctttttggacaaatcattcagcaaatagcgttggatggcacgtttcacgggacgggcaccgaattcgggatcatagcctgtgctggcaatgaaacggacggcctcatcggtcatttccaaagtaatgccgttgccggccagcatattcttgataccgttgatttgtaacatcacaatctgttctatctcttctctgttcaaaggcaagaacatgattgtttcatctatacggttcagaaactccggccgtatcgtttttttcaacatggacattacctctttcttcgtctcttcaatcaccacttcgcgattctcgtcattaatcttttcgaactggctttgaatgtatgcgctgcccagattggaagtcatgatgataattgtattcttgaagtttaccgtacgtcccttgttgtcagtcagacgtccgtcatccaaaacttgcagcagaatattgaacacatcgggatgtgctttttctatttcatcaaacaataccacagagtatggtttgcgtcggacggcttctgtcaactgaccgccttcatcgtaacctacgtatccgggaggcgctccgatcagacgggatacagagtgtttctcctgatattcgctcatgtcgatacgcgtcatcagactctcgtcatcaaacaggtagtcggccaatgctttggcaagttctgtcttacctacaccggtagtacccaggaagatgaatgaacctatcggacgtttcgggtcctgtaatccggcacggctacggcgtacggcatcggatacggctgctatggcttcatcctgacctaccacacgcaaatgtaattcttgctccagatgaagcaatttgtcacgttcgctttgcagcatcttgttgaccggtatccctgtccaccgtgaaacaacatcggcaatgtcctcagcggtaacttcttcctttatcatggcactgtcaccctgcttgtgtttcaggtcttcttgaatatccttgatctcgttctctaaagcctgtaattttccataacggatttcggctactttaccgtaatctccctcacgttccgctttctcggcttcaaatttcaattgttctatttcctgcttgttttgctgaatcttgttgaccagttccttttcactctgccatttggctttgtaagaggtttcctgttctttcagttcggcaatctctttattcagttgttgtaatttcggctcgtctttttcacgtttgatggcctcacgttcaatttccagttgtttcaggtgacgtgagatttcatccagttcttcaggcacggaatcacgttccatacgcaatttggcagcagcttcatccatcaggtcaatagccttgtccggaaggaaacgttcggtaatgtaacggttactcaattctacagcggcaatgatggcttcatctttgatacgtaccttgtgatggttttcgtaacgttctttcaatccacggagaatggagatggtgctcagcgtgtccggttcggctaccataacggtttggaaccggcgttccaatgccttgtccttttcgaagtacttctgatattcgtccaaagtagtggctccgatgctgcggagctcaccacgggccaaggcgggttttaatatattggcggcatccatggcaccttcacctttaccggctccgaccaaggtatggatttcatcgataaacaggatgatgctgccttcggctttgattacttcattgacaacagatttcagacgttcttcaaattcacctttgtatttggctccggcaaccagtgcgcccatatccaatgagaagatttgtttgttcttcaagttgtcgggtacatcacctcggatgatacggtgtgccaagccttcaacaatggcggtcttaccggtacccggctcaccgattaaaatcggattattcttggtacggcggcttaatatttgtaataccctacgtatttcttcatcacgcccgataaccggatcaagttttccgctgcgggcagcctcattcaaattaatggcatatttgcttaaggattgataagtgtcttcactggattgtgaagttactttttcacctttacgtagttctgctatggcggagcgcagctctttgtctgtcattcccgcgtctttcaatatggtagcgacagtactctttacattcaacaaggctaggataatagcttccagtgaaacgaattcgtcacccatctctttggaatactgtacggctctttgtaatatctcgttgctttcacggctaaggtaaggttctcctcccgaaaccttaggcagcgagtcaatttgcttgtcgatgaccaatgcgatctgctgggcgttcattcccaatttctggaaaatgaagttggtgacgttttcacctactttcagtactccggccaacagatgcacaggctcgatagcttgctgtccgcgggcttgagttatgttcaccgcttgttgcactgcctcctgtgatttaattgtgaagttgttaaaattcatattgtatctcctttctaaatattattcaaatacctattgaaaacgtaactgtcactgctttgttcagtggcttttgcgatttcatttgataatcgtcaaatagtttgccaaaaagaaaaagaaagctaatgaagtaaaataagaagacaaaatggcaggctttccggcttttaaatgaaaaaaagtccgaattgtacacaaaaaggcagataactctttttgcaagcagatgataattgctatcttagcatcgaaatcataaaatgaaaacgagatgacaaatgaaataaagtttgcagatactgtaattctggtggatgtagcctatgtagacagggtggcgggtgatttatccaaacattttggtgacgtggtgggccgtaagttgccgaaagcggatttaccggtgttgttggaatgtctgtcactggatagtggaatacccttgggggagaatgcagttcaggtattatttatttatgacgaggaaagtaagaaaatggatgcttttcagccgtcggatttggaaaaggaattaaataacgtggctttcaaaagccagttgggagagtttgcactttattctttcgaaccatcggatatggctagtcgcgaagagttgtttctggagtctttgagagtggtggttgatgcaaaagaggtgaaacgggtgattattgtccctgccgaagaagaatatggagataaagttcctgctatattaaataaggtggacggaaaagaaaaaatgacggtattcggtatgaatcctccaaccagtgaagtcgcttatcagtgggagatgtttggattcgctgttttacagtcgttaggaattaaagcagacgaactataatcattaaaaaacatgtctgatttcaggttaagagtattcagtagtgttgcgaaaaacctcagctttacaaaggcttcgcaagagctgtttattagtcagccggctataaccaagcatattcaggaattggagacgatgtaccagacacgcctttttgagcgaatggggaacaagatcttgctgactgatgcaggcaggttgttgttggagcattgtgagaaaattttggaagattacggacgcttggagtacgagatgaacttattacgtaatgagcataccggtgagttgcgcttgggagccagtactacaattgcccaatatgtgcttccccctttgctggcccgcttcatcgagaagtttccgcaagtgtctttatcacttttcagcgggaactcctctgaggtggaaaaggcattgcaggaacatcgtatagatttggcactggtagagggaaatacccggcaacctaatttgaaatatactccttttctgcaagatgagctggtggctatcgtccatactcatagtaagtggatggattatgatgagataactttggatgaattgaaagaagttcctcttgtacttcgtgaaagaggttcgggaacattggatgtattgattaccgctttgcataaacacaacataaagttatcggaccttactatccgtatgcacctgggaagtacagagagcattaaattatttctggaaaatagtgagtgcatggggattttgtctatccggtctattaataaagaactgtattcagggaagtttaaagtattggatataaaagacctggtgatgtttcgtgaatttgattttgtccaattgcaagggcaggatacagggctcccggctctgttcatgcaatttgccaatcattataaggaaaagttataacttataattaaaaacgattagattgtttttgaaacatatattacctttgcatcccgaaatggagaaataatgttaaaaagtaaaatatatgatttcagtaacagctttacagcaaaacagcaaaactatttatgtaggtttgctttccacgttaacggtctttttgttgatggactatattccggtattggcttcattttcccagtgggtcactccccccgtatctttatttctggggttgatatttgcattagtttgcggacaggcctatcctaagttcaataaaaaggtttctaaatatttgttgcaatattctgtagtgggattggggttcggtatgaatcttcaggcttctctggcttccggtaaggaaggaatggaattcacgatcatttctgtaatcggtacaatgattataggtatgtttatagggcataaacttttgaaggtagatcgtgatacggcttatcttatcagttcgggtactgcaatttgtgggggaagcgctattgctgctgtgggtcctgtattgaaagctaaagatagtgagatgtctgtggctttggctactatctttgtattgaatgccatcgctttgtttatttttccggtgttaggccatatgtttgggttagatcaacaacagtttggtacttgggcagctattgctattcatgatacgagttctgtggtgggagcaggtgcggcatacggtgaagaggcgttgaaagtggcgacaacaatcaaactgacccgtgcactttggattattcctttggcattcgctacttcttttattttcaagggaagcggtaagaaagtaagcattccttggtttatcctttattttgttgtggctatcattctgaatacttatgtgctggatggtgtgcctcaattcgggcaggctgtttccggactggcacgtaaaggattgattattaccatgttctttattggagcttccttgtctatggatgtattgaagcaagtaggtatgaaacctctgattcaaggtgttgctctttgggcggtgatcagtcttagttcattggcttatattctacttttctgatagggatttattagaatattaaaaagtatgcggatgatatggattgtctgaaaaatcctgttatccgcatgtttttttatgagaatataatttagaagtaatagatgagtaatagtacagcgtttactccaatgacagtgaggaatcctttccatacataaggcagcatttcttttctgcgggaggaaaaaaatatggcatagaacatattcactacgatgttgctgatgatagcttgcatgatacaggcccctacaatggttgccggaatgtttccgccttgtaacaggtttagtatgaaaggagtgatatcacttaatcctgttgcaatggagagaatactcaaacctcctgttcctgcataaaccaatgtatagtgagtcagaaatgtaaatactacaaataataaagcaaagatcagagcgactttgaattccagtggattactttccgtttccgtttcttcaataacttcgcgctcgccttttatagtatgctttttatggatgaatatgccgatgccggcggcggttgcagacatgatgagcagataggggtaaatattcagaaagatggaagtgctgaatataaggatcaaaatcatgaaacgtaagaacatcatgctgacagcaagcatcatggcagatacatattccggtatttcatgcgcttgtatccgtttgcatttgcgggcaaggatggaaatggtagcggtgctgctatacagaccaccgataatgcccgaaaccaaagtgcctgattcgcggaaaacatattgcttcagcaggtaggacaaataggagatacccgatacgactacagtagccagccaaatggtgtatggagtgagattgatacccggtatgagaggttccttgggtagcatgggcaaaatgataccgctgatagccagaaattttgccagtgtgatcatttcatcattctgcatccgttgtacaagttctgtgaaggtgtgtttcatttctgtgaaaagaagcacggtgactaccatcatcacgtaaaaccaggaaggttgtgtacttatgataggagccatacaataggtgataagggcgatgatgattgttgtcactccaaacacgtggaactgggattgcttgacataataattgatgcccagtaacatacctaaaattattccgcctcccataaataaatgcatttccttaggatcaagtatatagaggagatatcccaaaatgccgataaaagtaaaagtccggtctgtgccgaaaagcgtagtttccccctctcgtttcaggctgattctccgttgggataaaccgatgagtaaagagaacaaggtcaccagaatgaaagtaaccaattgctggggaaggtaatcgtacaacttttccataaatctgtcaagattaggttgatgtaataggttttccttttaaactgcattgactcctctgatggattcaagtggctttaaaacgcttgcttaaactggctttcttcaaaaagtccttttaatttatcatcactttttatttggttgatgattgtggacagaactcctgctttaggcaattctaccacaacgtctgttttatatttaccaccgctctgccggctgttttcacagattacttttaagttagcagcctcttgctgggtagccatatggatcagatctgagaactgttcccactctgcattaccgaattttttttgagacttggcagccatttccgcctttgctttgatctggctggttattgcggtacgggctgcaatgaccgccttctttttggaggcagtggcatcaccgctctgagctgatgctgaggcacggaagaagtctgcgtttgtgctatatgcatttccggtacaaggagtgctttgtgcctgtgcccatgttgacattccaaggacgaaggctaaaaaatagatgaatttataatatttcatagttgtaattttatcaatctattgcgaagatagaagaatatttgataatataaacaagaaaagggaaaaaaaagattgagcttgctttatgaaatgattatatttgcagaaattaaatgaaaggttagtattcatggaatcaacaacaaaactctattcgttaaattacacaaacgcaaatacttatttatttgcattcgtgtttattgtaggtaatgtggtattgccgcaactttgtcatttggtgcatttgggtggacctgctatgttacccatttatttcttcacattaataggtgcttataaatatggattcaaagtggggatgttgacggctgttctttctccgcttgtcaatagtttcttgtttggaatgccttctgtgaccatacttccggctatattggtaaagtcggtattgttggcgttggtggcgggatatatggcagatcgtttccgtaagattacgattcctgcattgctggggactgttatggcatatcaggtggtgggtaccttgatagaatgggctcttgtcggtgatttctatttggcggcacaggatttccggattggaattccgggcatgttgctccagatttttggtggctatgctttgttgaaagctattgcaaaaagataagttgtaaacatttgatgttatgctgcaaattgtgaaacagcctgaaaatggtggcgctggctatgttctggtagctgtcatggatggagatcccggtaaatggatgactttggtttttgataaatcatttaatagttaatagataaaatgacaggcacattattatttttaggattaggaatgcaggaaatattattcattgcattgattgttcttttattctttggtgggaagaagatacccgaactgatgaaggggttgggcaaaggggttaagagttttaaggaagggatgaacggggtggaggatgatatagatggaaaagataagaaaggggaaacgaaagagtgacaaatgatggaacaacagcagaagatactgactttttgggatcatctggaagaactgcgccatgtcttgttccgtattgcagtggctgtggtatttctaatgttggtagcattcttgtttaaggatgagctttttgctattgttctagcgcctaagaatgctgatttcattatttatcgttttttttgccggatagctgatttcatggctatgccttcattatgtccggaagtgttttatgtgaaaatgatcaatacccaattggcggctcaattcattactcatatgagcgtgtctttttatacgggttttttgctggcatctccttatgttatttatcagttgttccgttttgtttcgccggctttatacgagaatgaaaagaaatattctacccggattgtagggtggggctattttctttttatgatgggagttcttttgaattattttttgattttccctcttactttccgttttcttgctacctatcaggtcagtatggaagtggagaacacgattactttgtcttcgtatatggatacattgatgatgatgagcctgatgatggggattgttttcgagattcctgtcctttgttggctttttgccaaactgggatttcttacggctgattttatgaagcggtatcgtcgtcatgctattgttattattctgatagttggagctgttatcactcctacgtcagatgtctttacattgatgatggtgtctgtgcctatgtatttgctttacgaagtcagcatttggattgtaagtcggattgggaagaaacagcgggaagaatccgtagaggaagtgcttgaaaaatcatgagatgataatccttataaatgttattccgtaaaaaaggaagacctttcatgataggccttcctttttccattaggatccatactttattaaattttccagccaaaggcttctgctacggccggaaacacaatctttccgtttacaatattcaagccgttttttagtcccggatcgttttcgcaagctttttcccaaccaagatctgccaatctgatagcgtatggcagtgtagcattggttaatgccaaggttgaagtacacggcacggctcccggaatatttgccacacagtaatggatgataccgtctacttcgtaaatgggttcggcatgagttgtgggatgggaggtttcaaaacatcctccttggtcaatggccacatctaccagtacagtaccctttttcatcagtttcagcatagggcgtgttatgaggtggggagcctttgcaccggggataagaactgcaccgattatcaaatcagttgttggcagttctttttctatattgtggctggacgagaataatgtttttacatttttaggcatgaactcactcaactgacgcaggcggggtaatgaaatatcacagattgtgacatcagcccctaatcctgcagccattaaagctgcattggttcctacaatgccgccgcctaataccagcactttggctggcttgacaccgggaactccacctagcaagatgccacgtcctccttgaggcttctccaaaaaacgtgctccttcctgagtggacattcgtcccgccacttcactcatgggaatcagcagaggcagtcctccttgtttgtctgttacagtttcgtaagctaggcatactgaaccactacgcatcattgcctccgttaattctttgtcacaggcaaaatggaagtatgtaaataccagttggcccttacgtaccaggttatattcacattcgatgggttccttgacttttataatcatctcggcaatggcgtacacatcttctatagtaggaaggatacgcgctccgactttctcatactcttcatcggaaaatccgctgtttatacctgcggtgtgttgtatatacaccgtgtgacctctctgtaccaactcgtgtgctcctgcaggggttaatgatacacgattctcgttgtttttgatttctttaggaattcctactatcataattgtcacatttaaggggtttgactgcctcaaagataacaaaatgtcagaaaagtaggttttgtccggatatgtttttttcgtaataaatgtatgtttagcaacattgttttaagggatattctgttttttatttgtaagtttgcggagagattcaaaatttttgtgatgagttctccataaaataaagaaaatgactttacgaaattatataatcatagcagctttgggcagtgttcttgctgtacgggcacaggaagaaccggctgctcctgtattccgtcctccttttgattttccgcttattctgagcggtaatttcggtgaactgcgttctaaccactttcatggaggagtggattttaaaacccagggagaggtgggaaaacctattcattgcattgccgacggatatgtgagccgtgtactggttactcccggaggatatgggcaggctatttttattacgcatcccaatggatatacttcagtatatggacatgtgttgaaatttgcttctgcagtggcaaaagtggtggaggaatatcaatatcggcatgaaacttttgctgtggatttgaaattcgagcctcatcaggtcagtttcaaagctggagaaatcattgctttaagcggtaatgaagggtattctttcggaccgcatctgcatatggagatacgccgtacggatactggtgaattgatagatcccttacagttctataccgataaaattaaagacactactccgccacgtgcgtcaatgattatgctttatccgcagcggggcgctggagttgtggaaggctcacaaagaaaaaaatccatatctgttgcttctttgggacaaccggtttctgcttgggggaaaatagccgctggcattaaggcatacgactatatggatggcacacataataattatggtgtgcgttccgtggtactctatgtggatacgacagaagtttttcgcagtacggtggatggcgttttgcccgaagagaaccggatgattaatgcctggacagactatgaggagaatgtaaagaggcataattgggtgatgcgctcacagattcttcccggaaatagtttgcgcatgttgcaagccaatgatgaaggaggggtggttacgattgatgaagaacgtgattatcattttcgttatgaattagctgatttatacgggaataagtcgacttatcgtttcattgtgcgtggccgtaggcagccgatagaggaatatcatccgcaggtaaaacattatttggcatggaataaaggtaatgtggttcaggaaccgggtatggaactggttatcccccgaggaatgttgtatgaggatgtggcactgaactgtcatgtggttaaagatacagccgcaatatcttacgagtaccagttgcacgatgagccagtagctttgcaggctgggtgcacgctgatgatcggggtacgccatcttcctgtagaggatacgtcgaaatattatgtggcccgtaagtggggaaaaaggaaaggttcagcaggaggaatttatgaaaatggttggatgaagacttccatccgtgaactgggaacctataccgtagctatagatactttgtctccacgagtgaccccattaaataaggcacaatggaagacaggtaaggttcagttcaaaataggagatgcggaaacgggtattaaggattataaggtgaagatagacggcgaatttgccttattcggtttcagttccaaaaatgcgaaattgtggatgaagcatcctgaacggttaaaaaaaggagtcgcccataaattggaattggtggtgacagattattgtggaaacgaaacaaaagaggaatatgaattttgatggtaaaataagtattatacacaattaaaaagttatatattaatgaagaataaactgattttaggtgctgcctttctattggcggcaataacagagagtttggcatgcactaacctgattgtaggtaagggagcctcggttgatggttctgttatcgtttcttattccgctgattcatacggaatgtttggcgagttgtatcactatcctgccggtatgcatgaaaaaggaaccatgcgtgatatctatgattgggattcgggcaaatatttagggcaaataaaagaagcgcgtcaaacctataatgtgataggtaatatgaatgaatttcaggtaaccataggtgaaactacttttggtggacgggaggaattggttgattctaccggtattatggattatggaagtttgatttatgtagctctccagcgttctcgtacagctaaagaagccatacaggtaatgacggatttagtaaaagaatatggttattatagcagtggcgaatcattcagtatcgctgatcccaatgaagtctggattttggagatgatcggtaagggtcccggtgtgaaaggtgctgtatgggtagcagtccgtataccggatgattgtattgccgcacatgctaatcagagccggattcatcagttcaatatgaatgacaaggataattgtctttactctccggatgtgatttctttcgctcgtgaaaaaggttattttgacggtatgaataaagatttcagtttctcggcggcatataatcctttagattttggtggtgtacggttctgtgaagcgcgtgtatggagtttctataatatgttcaacaagtcggtgggagatacctatcttccttatattcagggggacagcaaagaaccgatgcctctttatatcaagccttcccgtaaactttcagtacgtgatgtacaagcggctatgcgcgatcactatgagggtactccactggatataactaatgatcccggtgccggtccgtttaaaactccttatcgtctgtctcccttgagttttaaagtaggagatcaggaatatttcaatgaacgtcccatttcgactcagcaaacggctttcacttttgtggcacagatgcgtgctaacctgcccgatgcaatagggggagtattatggtttggaacagatgatgctaatatgacagtgtttgctcctgtatattgttgttcggatcgtattcctgactgttatagcggtaaagaagccgactgtgtaactttttcatgggactctgcattttggatttataattgggtggccgatatgattcgtccacgttatagcctgatgattgatgatatgcgtgccgttcaaaataatttggaagatacttatgcgaatgcacaggctggcattgaatcttctgccatgagcttatatgaaaaagatcctgtaaaggcaaaagagttcttgactaactatagttgcatgacagccgaatcggcaatagacagctggaagaaattgggcgaatttttgattgtgaagtataatgacggtgctgtgaaaaagatggcaaaagatggaaccatacttcgtcctgaaaccggtcattgcgctcctttggtacgtccggggtatcccaaagaatttttggaagaactggtaaaggccaccggtgaacgctataagatgaaataggatatatttttgtatgttctgaaagtctgattaattagtggaggggcaggttatgatcctgctcctgtgcataataagatagttttttagattgtattcaggatgcctgggaacttttctgactgttatatagtagtgtttttttaccttgtatggtcttctgcttttttatgacagattattttagggggataatcctttatatctctaattttcttctttcaaatttctaggatttttaatttaattcttttacatttgtcaagacgtaaaaatcggatgtaattataaaccttataaataacaaaaaattatggaaaatgaagaattgataaagcaagtgacagagaaagcagagaaatggttaacacctgcttatgatgccgaaacacaggctgaaattaagaaaatgttggcgaatcccgataagactgatttgattgaagcattttataaagatttggagtttgggacaggtggtttgcgtggtattatgggcgtgggcagtaaccgtatgaatatttatacggtaggtgctgctactcaaggtttgtccaattatctaaataaaaattttaaagatctcgatcagatatctgttgtggtaggtcatgattgccgtaacaacagccgtttgtttgcggaaatttctgccaatatcttttctgcgaacggtattaaagtatatttgtttgaagatatgcgtcctactcctgaaatgtcatttgctatccgtcatttcggttgccagagcggtatcaatattactgcctctcataatccgagagaatacaatggttacaaggcttattgggatgatggtgcacaagtattggctccgcacgataagggtatcattgatgaggtgaacaagatttcatcggctactgacatcaagtttgaaggtaacaaggatctgattcagattgtgggcgaagaggtagacagcgtctatttgaataaagtgaaaacaatttctattgatcctgaagtgatcaagcgtcagaaggatttgaaaattgtgtatactccgattcatggtacaggtatgatgttgattccgcgtgcattgaagcaatggggatttgaaaatgtacataccgtgcctgaacaaatggtgaagagtggcgattttccgactgttgtctctccgaatccggaaaatgccgaggctttgtctatggctattgatttggctaagaaaatagacgctgacattgtaatggctagcgatccggatgctgaccgcgtaggtatggcttgtaaaaatgacaaaggagaatgggtgctgatcaatggtaaccaaacctgtttgctgttcttgtattatataataaagaaccgtattgcgatgggtaagatgaaggatgatgatttcattgtgaagactatcgttactacggaactgattaaatctgtcgcagacaagaatcacatcgaaatgttggattgctataccggattcaagtggattgcacgtgaaatccgtttgcgtgaaggcaaacagcaatacatcggaggtggtgaagaaagctacggattcctggccgaagactttgtccgtgataaagatgctgtttctgcttgtacattgttggcggagatttgtgcttgggcaaaagaccagggcaagaccttgttcgaagttttgcttgatatttatgtggagtatggtttctcaaaagaaactactgtgaatgttgtgaaaccaggaaagagcggggcagaagagattaaggcaatgatggaaaacttccgttctaatcctccgagagaaataggcggttctaaggttgttcttgtcaaggactttaaaactttgaaggtgacagatggtaacgggaatataacagaaatagatatgccggaggctagtaacgtattgcaatattttacggaagatggaactaagatttcagttcgcccgtcaggaacagaacctaaaatcaaattttatgtggaagtaaaaggtgaaatgggttgccacaaatgtttcgatgctgctaatgcagctgctgaggaaaaggtggaagccgtaagaaaatcactgggaatttaatcgagtataagcatcgggcgaaagtctgagagaatattcataaataaaagaaggggtggtggagatgtatttctctatcccccttttcttttatttccgtgccatttatatcaaaatctacacttctttgtttattttttgttgtaactttgccttctgttttaaataaggtaaaagatatgatgtggttacttttggcatttctctcggctgcattgctgggattctatgatgtatttaagaaacagtcgttgaaggacaatgcggttattccggtattatttctgaatacgttgttctctagtttgatatttcttccttttattgtattgtcagtgtggaggccgggaatattggaggattctattttttatgtgcctgttgcagggtgggaggtgcatcgctatgtggtgttgaaatctgttattgtcctttcgtcgtggatattgggatattttgggatgaagaatctgcctatcacaattgtgggacctataaacgctactcgtccggtgatggtgttggtgggagctttagtggtctttggtgagcgattgaatttttaccaatggattggtgtgctgatggctgtcttctctttttttatgctgagccgcagcggaaagaaagagggaatagatttcaaacataataaatggatttattatgtggtaatggcagctgtgttgggagcggtcagcgggctttatgacaagtatctcatggcgcctgtcgatcaaggaggtatcggactggatagaatgattgtacagtcatggtataatatctatcaattgtttatgatgggaggtgttttgatgttgttatggtggccgaagcgcaaatctaccactccgtttcattggcattggtgtattattctgatatctatttttctgtcggcagctgattttgtttatttctatgccttaagcttggacggtgcaatgatttccatagtatctatggtaaggcgtggcagtgtgcttgtttcttttctatttggtgcaatggtattccgtgagaagaatcttaaaagcaaggctgtggatttggcactggtacttattggtatgatatttttgtatttgggaagtcggtaagcaaaaaagacggggtgtgactcatcgtgcataccccgttattctttattactctataatgattttatattctacatcaaacgtttcttttggttccaatttctgtatccattcacggtcctttaattcgcccgaataccctacagaatcgcaacgtccataccatggttcaatgcaaacaaatgggcaatcgggatgtgtcttggtaggagaccacaaagctaccaatggagaattaaattccaagctgatatggggctttttctttttatccagtaaggttatttttttcagttgtttattgtcaaaaatataagtgtcacaatcaaaagtatgaatatcaattggcatcagcccttctttgtttaattttagtacatgacgttctggtgatacgcaccccttttcggttggcatgatatattctaagtcagactttcggtcaaaaacaaagaagccacgatcctttgtagcagcatcgaactcggggaaatagaaagctgggtgtgctccaatctggaaatacatatccatagctcccagattttctacacgccattttacggtgattttattttcctccaataaatatcccaccagcaggcggaagggaaaaggaaacttgcccaatgtatcaggagtgctttccaaccaatatacagctcctttgtcttctttataggttagtttgaagtccatatcacgtgcaaaaccgtgttgtcctatttcataagtgtttccggcatgacggtatttattgttccacacacgtcctactatagggaaaaggacaggtgaacgccgtccccaaaatttagcgtcgccctgccaaagatattctttgccatcctttttgatactttgaagctcggcgccatgctcggctatttgtacagtcaggatagaattagatagtgtttccatgtttcttcgtttataaattcttttttcaaaggtagggatgtttcatgacatgacaaagtgaatcttcatctttgtgtaaattttatctaaaaggctgtttgggtcaaataaattttaataaaagtatatggttgtgtttatttttgcttatgtttgtcaataagctatgaaggaggataagatggagaacatacatttgatatttaaatttttatggtatagtgtattattttgtatatggggagtatcttgtacaagttccggaacttataaaaagacccaaatggatatctatatgcagtattatgattttataattgattcattgtcaaaaaatcctagttatgtatgtacccggactgccaggcaaatgtcggttgccacagatagtgtggcgtattaccattatcttgttcttttggcaaaagcatatatgtttaaatccgagatggattcggctaaacttagcatggatagagcggaagtattttgcgatggagctgaaccgtcatcgttaattaatgatttgtatgctgagatttacaatatgcggggtaatgtatgtgctcgtcaagggttgacagattcttcagtggtatgttttcaaaaagcatttgattatcgtttgaagggtagtaacagagatatgcttcatgatatttctattaatttggctgatgcttttgtccgtaccggtcattatgataaaggcgcgatgtggtatcgtaaagctttgtcttactgtgattcattgaagattcctgaagaaaaacgttttcctgtttattacggattggcacaggtttatatggaacttcgtgattttacgtcttgtgatcattactatgaactggctgcccggcaatatgataagatgcttccatttgagaaacatatttatttgaataatcgtggtaattcttattattttcgtgctgattatcctaatgctttggaatttttcagaaaatcattattgttagctcgttcttatccggatatgatttttgaggaacatctgactgaaatgaatttgggagaaacttttctattgatgaatcaggttgattctgccgcatactatttaaacctttgcagtgatttttttcgttctatcgaaaatcagacggctctctattatttggatacccaattgattgaacttgccttgaagcagaataacttgtctttagcacgtaaacgtatgtctgaggctatacagcctgattatgtggaaccgaatatgcagcatatccgtaaccgttacctgcaacattattttgaagaggtgggggatttcaaacaagcctattattatcaaatggaaaatcagcgtattgatgattctacacgtaatgagcgtattaaaatgcgtacagctgaaattgatctgaaatacagtcaggacaccacgctgatgaagcagaaaatttttatccagcaaaaagagaatgaagtactggcgctgaatcagacgctttacctgtggatgtttgcctgcatctgtattttggggctcgttgtttttgtttacatgtacaacaagagacagcgtttcctgctgcaaatgaaaagtcagaatatgattgccactttgcgtatggagaatatccgtaaccgggtttccccccatttcatttttaacattctgaaccgtgagatgggaaactacaccgatgagcaggccggaaatatgcgtgggttggtaaagctgatgcggcgcaacctggaactgaccgaacagctgtgcgttaccatggccgaggaactggactttgtcaatacgtttatcaacctggaacgtgaagcattgggagatagctttatactgtccacatccatagatgctgccatccatcttgaccaagaaatacttccttccatgatgatacagattccgatagaaaatgccatcaagcatgccctgaaggacaaagaggggatgaaaagactgtggattgatatcaagaagaccggggagggaatctgcgtcaaggtgcgtgacaatgggggaggttaccggataaacagtgccaaccatggtacaggcaccggtataaaagtgattcttcaaaccatacagttgttgaacgccaacaataaaaagcatatcgacatatccataaccaatgtgcagctggaagacggagaaaccggttgcgagtttgctgtcttcctgccccaaggctatgattataatttgaaaaagatggtttagttattatttttgctaggatagtgtccgaaacggtcgctatagttccataaccggagtgtcgggtttgtgcgttaaaacatgttttaatacttttgttccgttaataactaaagcaggattgtttactatggataaactatacagggtcgtaataattgatgatgatgagttctctgcggacaatctttgtctggagctgaagaaatataacaggctgtctatagacgggatggcacgtaacggtgcgaatggccggaaactgctggaaaaggttcatccggacttgctgtttctggacgtggaattgccggacatgaagggcatggaactgctggaacagctaaggggggcaatcacttggaatatgcagattgtgttctatacagcttatgataagtacatgatttatgctattcgtggggcagctttcgactacttgctgaagcctatagataagaaggagctggaagggatcattgaccgcttcatgaaaaaggcggaagagtcggcagccgcatctttggttatccctccgcgtgtgtattcggccggcgagcatacttttatgatatccacacccatcaatgacttgcgcattctgcgctccattgacatcggttttttccgttataactccgaccggaaactgtgggaagtggtgctgaacaaccagctgcctttgctgctgaagaaaaatactacggccgatcatatcaagggatatgactcctgcttcgtccagatccatcagtcgtatatcattaatatcaattatctgatgatgattaaggagaaccgctgcgtcatgtttcccccgtttgagaatattacggaacttcaggtttccaagaagttcagaaaagaattgcaggataggttttatttgttgtagtgaatctattgatgacgttgaaaatacaagtttatagaaagtgattttaagtcacagtggaaaagcaggagtcgtgagattgctgctttttttgtttttagtgcttaattttccctttgcggtatatggaaatgaggctatatagtcgttaatttagatagaatagtatgcttgttaggctgtttgatactttctcttggttttgtgaatttgtaaaatgacgttaattgtttttctttgaagccgcataaggttaaaaaaagacatgtatatgaatgaagtaaaaaaagtaatattgtttttattatgctgtgctataccttttagtttttatgcacagaaggcgcgccaaaatgctgtaacaaagaaatggggatatgagcagaccgaaaataaaggatggtgggaaaattcaaaatataggggtaattctatgtttggtggatgggatgcggctttagtaaatcaggattatgagataaattggttgatttctccacaatatgaaggggtgaccaagagatttacagaaaagttggcaggagtagttttaggaggaaaagtaggttttatagacatacacaatcgttttataattaaaccgcagtttgaaaatgcagatgatattcatggatttaatttaggactgtctgcggtaaagaagaatggcaagtttggctttataaataaaaaaggagaatttgtcattgaacctcaatttgattacgctgataattttagagataacatgttggctacaatcaagcaagatggtaagttcggggctattaatttaaggggagaaatcgttgtcccatgtaaatatattctagaagaagcaatgataagcgttcctatatccaataaggtatatcgccagaaacaagaagaagtgaaaaatgcgaaagggaacggtgattttgatgatttgcttgataaaatcgctgaatgtagcagagaggtcaatgaaaaaattaataatcctggagcagaagttataaccgattctctcagaataagggaagataatggtaaaatgggccttgtagtgggaggacaaactgtaattcctacagaatatgaggaacttataatagcagaagatggatttgttcttgcttgcaagcaggataaatggggggctttggatatatatgggcgtactatattgccttgtgtttatcaatgggtatattatgatgtatcggcaaaggtctggattgccaaaagtcttgcaatggggctatataatagtcaaggtgctttattactaccgggaaggattgattatataggtagttttgtggatggcaaagcacctgtttggctgaattccgtactcggttggatagatacgaagggacaactctctgatggctttgcagaggatgtgacagaatcctttttgaaagaagaaaaaaagggagtggcaggtgcttggggtatgtttaatttattgacagatttgattccggactatgccatggcccactattatatgggaaaagggcaagtgactgatggcatttattctaaaggaatggagcatctgaagatagcggcagaattggatccggataatggagaagtagcgttagcgctgaagcaagccaaaaaggacaagaagaaaagaacgttgaatacgattggttacattgcaagtgtgcataatgatttggaatctacaaactctaattcttttaaagatgaaagcagaaatcaaaataagccttcatccggaattaatctgggagtttctatggatgaggtagatgcccttggtgggtctacagctactgctatagcaggaggtagtaatcattgtggttttttgaaatatgtgttagaagatcttgaagaaaagattcagaagaatacgggcgaattgatgggagagtattatcggaaagtgaaggatgaatatttgcagtttgccggtaaagaagggtgtgaacaataatatataattaaagaatagaattatgagagtaatgaatgtgaaatttgtcggtagaatcattatgacggttctttttgtattcatctgtattggagcgcacgcaggtgatgaccctttaaaatatgagatagagggagaaggagtaggtgcacaaggtatttatttggtaaaagtgacagtaatccagaagaaaagtaaattggatgtcgatgtgatcaagaagtgtgcagttcatggggtgctttttaaaggattttccagccagacttcacgcacccggcagaaacctttggcaggaagtatggtggtagaacagcaacattaggattattttgatgtctttttccaaaaaggaggttcttacatgaattttgccaatatggtaggagagaatctttcagtggtgaagatgggaaagcagtatcgaatttcagcagtggtttccgttgcgaaagacgccctctatcaagagctggtatcagccggagttattaaaggactaaataatggattttagcttatgtataagaggttgattgttacttttctgatactggctgacggattattgtctgcttttgcccggcaggctcgtgatgtgattaatctgaataatggtaacttgtatcattgaaattagactatgaattttaaagaagaaaaaattatgaaacatctgttttatacgtggaaattgggatgtctgcttttacttatccttgccggatgcagcagcaaaaaaagtgtttcttcctatcattcctttgagagtgaatgtttgggagtagaactggatgggtcggaaacacttcgcgcctggggcagagggaaaaatcgtacagatgctatagagcaggcaaagaaaaatgcagtaagagatgtcttgttcaaaggtgttgttgccggtagtcgtgaatgtagtgtgcgccctttgataacagaagtgaatgcacaggaacggtatgcatcttattttaacgacttttttagagacggaggggaatatctgaagtatgtaagtatggaagataagaaaacaaattctaacacgaaggcttctaataaaacccaaatttcttattccactacggtgcgtgtgcttcgttctcaattacagcagaaactgatagaagataaaattttaaaaccataaagacagaaaaacatgaaaaaattatatgctattttatttcttgtagcacttatacacaccggagtgtatgggcaggctaaaaaacccaccattatggttgttcccgctaatgtgtggtgtacccataatggttatacacaaaaatataacaatcaaggcactattactgaaattccggattataaaaaggcattggataatgatttgaacttggtgaatgtcataacgaaaataggtgaattgatggctgaaaaagattttccgttgaaggatatggcatcttctattcgttccatagagcagagttcggcggaacatgagatgactaccagttctacttcgggagcttcactggcagagtctcctttggatcggttaatgaatagagctaaagctgatattctgattgaagtagtttggaatattaatacaatgggtcccaaacgttctgttacttatactttgcgaggcttggatgcctacactaataagcaggtcgcagcgacgcaaggtacgggagaaccttctatggctgctgaagtggcagtattgttggaagaagcggtagtagacaagatggatgctttcgtaagtcaattacagaaacattttgatgatttgatggctaatggccgtgaagtggcattagaagtccgtgtgtttgataatgggagcggcgttaatttggaaagtgaatttgggggggctgaactacaggaaatcatagaagattgggtggcgcagaatacggtggctcatcgttttagtttaactgatgcaactgagaatatgatgctttttgagcaggtacgcattccgctttatcgtgaaaatggaatggctagagatacaagaagctttgcaaatgatttgcgcaaatatctcaatcagaaagccaatcttacctgcaaagtaatgacgaaagggttaggtaaagctgaattggttatcggagaaaaatagaaaagatatgaaaataaggaatatgatatttgccgcttggtgcgcatgttgtgccatctctgtggcagcacaggattgtgagataagccttaccatagctaaagctgcccagaaagaggaacttccatcccaggtacaagagattttaggaaatcgtttagctgcggcagtggccggtcaggggagtgttgccaattccaattttacaccattctttatcacagctaagaccaatactttatataaggaaacattgtccggtcctcctgtcagtacagcgcttactgttcaattgactttgtatataggcgatgcagtagggcagaaagtattttctactctcactgtggatgcaaaaggagtaggtactaatattaaccgggcatatatcaatgctttccgtgcaataaatggcaataacgtgaaaatacaagaatttatacgcgaagggaaagaaaaaattatctcttggtataatagtaattacaggcaaatattggtaaaagcgcaaaaaagtgcttctatgcatgagtatgatgctgcattgtattatgttacctctattcctgaatgttgtgtcggctatgaggaagctagtaaactgatagacacttattatactcaatatgtgaattataattgtcaattgattatgcaatacgccagatccgaatgggcgaagtcacccgatgcggaaggtgcttcaaaggcttttgactggttggttttcattgaaccgggaagcagttgtgaaggtgaagctaaagctttgtataatgaaataaagcaaaaggtgaccagtgattggaattttgagaatcgtgagaaatataaggatgaagtggggctgaaaaagcagaggatagaagctgccagagctataggtgtagcatttggtaatgggcagcaaccggttactactaatattacttggctccattaattcaagttcaaatgattttaaataaagagaatatgagaaataaaaaagttatcctaattctatgtctgctggtgctggtcagtggctctgtgcaagctcagaggttgaaggccgtgcagaatgaaaaggggcgttatggctttatgacggaagacgggacggtagtgataaaatataaatatgatgaagctactccctttaaagacggtatcgctaaaataggaaaagatggaaaatacagtctgattaatgaagatggtgaaatcattacaaaacggaaatatacatatatcggtgaattttataacggggtttgccccgtcgctgaaggtggaaatactaaaaaaggagtaatgctaaccacgggtgggctcataggcaataaagctagtagcaatacaggtgaaaaatgggggttgattgataaaacaggtaaggaaatcctgaaaaccgattatgaagcaatgggagatttgaataagaaactgatatatgtcttgaaaggcaagaagttcgggttcattgattcagctggcaatatcatagtgaagcctacttataattttattggcagtttcaataaccaaggaatctgttgggttaatatcggtggcaaatacgataaaaagaacaacatggtgtctaaaggtaaattcgggttaatcaatgaaaatgggcgggaaataattcctgccaagtatgaagatgtgggtaacttccctgttttgcgagataagaaaaccggagctttgcttgatgaggctgccttttataccaaggcagaccagtctgcatttccggctaccaagcaggaaatacagagcttgctgcttcccaaacctcatgccgctgagtcccagttgccttcatcaagggtcgattatttttatttcattaataagaaatcccaagggttggtagatatccatggaaatactattattcctttaactgccaatcaggctattcttcctccttcagacaatatgcttaggcttgctaaagtggaaaagaagcaaatagctaaagcttattatgatttggatgctgaagtgatggtcagaatatcttcttcagaaaagggaaagtttggagctttcagccataatttagctccggtttcattggatgatgaattgtatttcatagataaaaaggggaacaaggtgattggtggcctgtcaaaggctttcctgagtaatgaaggataccgggtggtacaaaagggatcggcttttggcgctattgattctacaggggcagttgttatttctattgaatataccaattcgcttaccagtgtgaacaatggacgtttgggagtacaaaaaaatgcttcttggttttatgtggatatgaaaggacaaatcgtatccgataagtatgaccgtataggcaattttcatcaggggtatgcatccgtatgcctgaacaaattatggggggctattgatttgcagaaccgggttgtcgttcctttagagtggcaaggtgtagctcctatagtcgatccgaaattgatatgggtgaaaaaggataacctgtattatctttatgatggggtgcaaaagtctgttcgtctgaagcagggatttgccaatgcgtccaactttgataatgagatggcttatgtgatgtctgatggaaagtgggggattattgatccggatggcaaggtactggtgccttgcttgttcgagaaagaagaggatatggtcttggccaaacaatatatgttagcggaagacaagaagaacttgaccgaagtagaggctcttcgagtgattgcacgttttgacccggatacaaatatgtttaagataacctctgtcattccggataaacattgggattattaattattgaatgtttgaaaaatgaaaagattcattataatacagctgttggcggtggtattcgccgctcaaattcaagcccagggagacggcgaaataaaatatcgccgcagttctctttatagcatgatgatcaatcacgaaggaagagaatttggtgatgaaataaaggatgtttttctcaaaattcctgttcctgataaatacaataaccatgatttaagtgtaaaagtaatctatacttctgaaaagaaattggataaaaaccatgaggagatagatgaatttatcagaaacaatggtattgccagccgtatggtaggacgctggtttaaccgtgattacatgacagggatctgtgatgtggaactggtgaaagaacgagggctgtataacgcttccgaactggacaaggctctggcatccaagactcaacgcggaaacgctctgctggaagatgccggtgaggacttgattggaaatacttttcttattgtgaatgacattcgctatattgaccgttcaaaaggttcaagtgtgtggggaggaattgtcaaaggactgggtgcggcagcggctatttacaccggtgagacatcctatatggatttaggtaattctacgggagatatggttgcatcctataaggggtttaaagtaaatattgatacttatctctatcaactggtttgggatgaagagactgcaacaaaattctatactcaatattatactgataaggataataaggagaaggtgaatgctttcaataataaccgtaagatgttcaagttgaagtatgtgggcagccagcatagtgatggaagtaacacttcctttttgggtattaacttggatgagccccagcaaatggtgcgaaaggcatgccaacgtgccattgatgaaaatatagcgagtctgcaaaagaattttgaccagttcaaagtgaatactcccttaatcagtgtttctcccctgaaagcttatattggcttgaaagagggagtcactgaaaagtctaaatttgaagtgctggaagctgaattgagcaaagaaggcaaaatgacttataagcgtgtaggagtgattcagcctaaggaaaatctgatttgggataatcgctatatggcttccgaggaacaggcttatggttcggactttggttttaccactttccgaaaagtatcgggtggcgatttttatccgggaatgttgattcgtgaaataaaataagtgtttaagttagccggcttcgtcaacagaagtgaaaattggttgcttgccaaaaagatttgttgatatggctgaatagtgaaacataaaacaaacaggcgtttattcttcggaaatgaacgcctgtttgtttatgttttaaaggaggtgtgtcgtaatgcacgatgcacctctttttttgttcatcactatacaaatctgttcactttctttaagctgcgatcttttgaagatttctttgatttatgtgttcccagcatctaaaaacagcagttgtaagctcataaaacagtctaatcagccagttcatacccttttttgtcagttttgcacacatcttttttatattgaaggcaatggctaggaaggcaaagtccatgaagaccttgtcctttccaaaatgtcggaaacgtttgtagttcatattgtttttaatttgtccgaacacggcttccggttctatgcatctctgccctctgtgtttcagtcctttctcagagcagagcagttctttggctctccgcttgtattgtctaagcctatgattcagttctatcgtcctgtttccttttgctttaaaacagcggcatcgcaggggacagccttcacacctgacagctctgtaccgtgcattttcgttgacatatccggatgcggttttcacattcctggtgcctatcctccgcatcctttgccccatagggcagatgcagaagtcatgttcttcattgtagtagaagttttcggccttgaacgggtccggtttgaatctcggccgctgctccatgtggaagtagttgtactttacgtaggcttccatgccgttttcggacatgaagcggtaattctcttcggagccatagccggaatcagcaaccaccgtatgggccatccggtcatacctgtttgaaaaagattgcaggaaaggaatcagggtcagtgtatccgtagggttcgggaagagtgcaaaatcggtgatgaactgattttcggtgccgatttgaaggttgtaaccgggcttcgtctgtccgttgcgcatggcatcctccttcattctcatgaaagtagcgtcattgtccgttttggaataggaattcctgtcctgcagcgtgtccagacggttgtcgtattcctgtagcttgtccctgtgctcttccaactccttcagctgtttgcgtttctttttcaacgcagtcttttcctctttcgtggagggttcaggaacctgttcgagtgcttgacgcaattctcctgccatttcagtcagcatggccggagtgaactcaatctcctcattgctttccgatgagttctcctgggcgatgacattgtctatctgccctagcaggatatgtatcttcttcatcaggcgttcacggttccgctcaaccgttttccgccagacgaaagtatacttattggctttggactcaatctttgtcccgtcaatgtattccacattcaagctgatgaagcctttggaagagagaaggagtacggtttgggtaaacacctcgttgatttcattcttcacccggttgcggaaacggttgatggtgatgaaatccggtttctcatatccggccagccagatataatggatgtcacggtgaaggagcttttcaattttccggcaggagtagatgttgttcatataggcatacagaatgaccttgagcatcatcctggggtggtaagggctacgcccgcattccttatacagctttctgaaactttcaagattcaagccctcaaccagggcgtcaaccatgcgcaccggatcgttttctgcaatatcctcatcaattctttgaggaaaaagaacggtttggttgggattgtaagaacgaaaatgtatctttgtcatagtgaaattcttattacctaaagatacaaaatctttaggtaataacaaagccccagcttgtgaaagtcggggctttgtgcgtaaaaaacagaaggtgtgcattttgacacaccttcagtgaaacataaaacaaacaggcgtttattcttcggaaatgaacgcctgtttgtttatgttttaaatggttctatactgccagcttggagaggtgtgaaaagtagaactgtttttttgatggctcttccaatttcatatcatatagagctggaatgtgaagcttaatttacaaattttcaagcttgtcttattggcataatttatttattgtatatatagtcgttaattttagctgcttggtatctgctttagtgtgtttagtgtaaatcttgacaaatgatggttttttgaatataaaagttgcaatacatttgcaaatgtaaacttatagagtcaattgttacgaagtatggaaaagacaattattgcagcacttttaatgctgatttcgttaatatcgtatgcacagggtttaatgtggactgcgaaggctgaactcaatatgagcagcatgtctaacgtagaggaatctaaaatgcatccaggtttctatgcaggaataggagctgggtatgttattgatgaaactcggtctgtccgtccttctttattgttcactatgaaaggagtgaaacaagattacaaattttaataaaaatactgcattatgaagaaactgttttttatcatggctatgtccgtatgtgcattcacggcacaagcacaaactacttccggtattcgtgtggggttaaatatgaccagtgctacagggaagtataatgatcttatggcagatcaagattataataataaaagctatatgggttacagtatccattattttatagatgttcctgtgattggaaacttcagtattcagcctgctgttggactttctatgaaaggtatcacttatgagtacgataaatttaccactaaaaagtcgcatcggctcgatttggattcttataagaaatatgatgtgacggaatctcgcggcactagtgtcactcaaaaacataatctgggatatttggacgttcctattttatttgcttatgctttacctttgtcagaatcgtttagggttcagttgggagtggggccttacttctcttatgggttgtttggtaagtttaaatatgagtcggataaatatttgacagtatcccccgacaaatatggagaaaataaacataccataaccaaagatgattatccctcctttggcaagaatgatgatgcggacgatcctaaaggtaatattaaccgttttgattggggaattgccgtacagggcagcatttattggaaacgcttgtttttgaatgtcgcttatcaaaaaggtttgaaatcggctaatattactgacgagaagaatgaagggaaagataaattggccctttccaatttgtcgttagggttaggctttatattttaagttgtgaacaggctgaggaactgctggaaaatagaagaatagagaggcatcagaaatttgatgaaacttgtgcaccctttcttgccgaaatgaagaatctgtcggatgtaaatagaggttcatttggaaacgtatgtgtagaaacccgtttccggtcactgttccgtatcgttccgaaagtctttattcttttcggaaaagacaaggacgtttacaaaaaagatgaagacgtctgataaaaagaacaagacgtttcattccaaagatctatatctttcaatctttagtttaagtctttccggctctaccggtttatccttctcctccgaaagggaaggatgctggatgtaacggcaaaacttggtacaggatttcgtggaacttgctgcaagatccgacagaacttgtatcaagattctgaatactttggcaaggaaagtcgcagtttcgaggctgcacaagcttaccgtgtttattgcacaagcctgctttgtccaccggacagggcaggcttgtaccatggaacaaggtggataaagtggtggctgcaggcatttttcttgcataaaataatgtattgccatcacctctctaactccctattcataggaagttagagaggtgatggcagtggcaacagaattataaaactctgttgtaggaaagtggggcaattggaaacgactcctctgtacaacacacgttatcttttattttctttttccggataatgaggtccataaagcatggtcttctccttgaccaccaatcggccgtccttcacgaactcttcaccgcgttcacttaaatggcgaatcatttcattacgcatttccgtcagctgtttcctgtattttttgtcattgacggcattgtgcaattcctgagggtcttgggtcaagtcgaataactcttcggtaccggtatggatacgccatatatattttattttgccgtcagtcagtgcacaccaatagttatcatcactgtaacaggtggcatgctccagatccagatacttgcgccagtttgtttccatgcctttggcaagcggtaacaaggaacggccgtccatgtcagtggggatggtcacatcggctgcatcgaggaaagtgggaagaatatcacgcaactctacgggagcgtctgtttttcccggtgtaacgtggttggcagaaggccatttcacgatgtatggcacatgagtggagccctcgtatggataggtctttctccagtgataatggtcacccatcatatcgccatgatcggaaacgaaaacgattaatgcgtcattatacatatccttttctttcaatgtttggataattctgcctatctgttcgtcaatgaaagtgatgttggcataataatgacgtttggaattgcgtgcatattcattgccaaaattaccgtatggagcgtcttgtgccgtttcttcaggatttagtttcttggcgtatttgccacaccagtctccgatggcaggatcgggtattagggcatccttatacatgtccagatatctttgtggtggatcatacggactgtgcggacgggcaaaagaaactttcagaaataacggtttgttggtcggatcgtagttgctgataagttcacaggccatttctcctgtccaataggtaggatggaggttttcgggcaatttatagatacttgccgtatggtcgttccagcctatgccggtggcgtcaggattctttccgggggcttttgtttggaaccattggcggtaatcactggtgaaattctcgtcctccacgcgtccgctttcatctagcagagtgccttcgaaaccatgttttatccgttggggatgccagtgcattttcccgattccaaaagtataataaccagcatcttttagcatctgtggcatttcgtatttatattcgggagatacttttccatatcccaacaagccatgatgccaaggagaaagtccggtcagcagacctgcacgtgccggagtgctgcttggacaagaagaataaccattcataaataatgttccctcggcagctagtgcgtccaggttaggggagataaccgcatcgtttcccatacagcctatggcatcagctcgctgttggtcggtcattatcagtatgatatgaggatgtttttgtgcgtatgcaaaagaggagcacactccggctgtgacagccaatgtgtatttcaggttgattagaatattcatgtttataggtttttcataatgttatgtgcaaaggtaggaaatttttggtaaccttaagccataaatggtgatggttacagtagaaatacttgaaattgaagtcttgttttgtacatacgtatgggtgacctcatatatactaatggtagaaaaggctataaaaaaaggcttgttccatacaggaacaagcctttttttatatgcatgtatcagagattattcaccccaattcattgcttccatacgtttgtaagaagcataacgtttcttggccatttcttcgcaagcagcaaatagatctgctgcttcagcaggatactgtttcattacagaagcaaaacgaacttcgttcttcaagaaatcctggaaaccttcccatttcggttctttagagtcaagcatgaatggattcttgccttcttcttccaaagcggggttgaaacgccacaagtgccagtaaccgcattctacagccttagcctcttcagcctggctcttacccatacctgccttcaaaccgtggttgatacacggagcgtaagcgataaccaatgacggaccggggtaagcttctgcttcacggatagctttcaaagtctgagcttggtcagcacccatagcaatctgggcaacatatacataaccgtaagtagtagcgatcataccaaggtctttcttacgtacacgcttacctgaagcggcaaacttagcgatagcacccagcggagtagccttagatgactgaccaccggtattagagtaaacttcagtatccaataccaaaatatttacatcttcaccggaagcaatcacgtggtccaaaccaccgtaaccgatatcgtaagaagcaccgtccccaccgataatccattggctcttcttaaccaaatagttcttgaattctgcaatggtagcgcagttcttacatttatctttagcagcttccaccattggaatgatcttttcggcagcagctttgctcttgtctgcatcgtccttaccgtcaatccattcctggaatgcttctttgtattctgccggacaagtatcactggcgatagcatccttcatagcagcttcgatacgtgcacgaagtttcttgtcagccaaagtcatacctaaaccgaattcgcagaaatcttcgaacaatgagttagcccaagcaggaccttgacccttttcgttcttagtataaggagttgaaggaacagaaccggagtagatagaagaacatccggtagcgttagcaaccatttcacggtcaccgaataactgggaaatcagtttcacatacggagtttcaccacaacctgaacaagctccagagaattcaaacaacggagtagcgaactgagagttcttcacattggctttgatatctaccaaatgttgtttgctcttcacgttcttagcgcagtattcccaattggctgcttgagacaactggctttccaaatgtttcattgtaagagccttgcctcccttcttcggattgcccggacaaacatcggcacagttaccacaacccagacagtcaagcacgtcaacctgaatacggaatgtcattccgtcaaattgtttacctacagctttcaatgtttcgaagtctgcacccttctgttcttcagcgtcaagtacgaacggacggatggaagcatgaggacaaacatatgcacacttgttacactggatacagttttcagcattccattcaggtacgaatgcagctacaccacgtttttcgtattgagcagtaccttgttcccaagtaccgtcttcgatgcctttgaatgcagataccggcaacaagtcaccatcctgagcgttgataggacgaactacttcgttgatgaatgcagggtcattgttagcagcaggagcttcaacttccagattagcccaagccggatcaacagccaattgtttgtattcaccaccacggtctacggcagcatagttcttgttcaccacgtcttcacccttcttgccataagacttaacgatgaatttcttcatctgttctacagccaagtcaacaggaataacgcctgtgatacggaagaatgctgattgcaggatggtattggtacggttgcccaaaccgatttcctgagcaatctgagttgcattgatgtagtaaacagtgatattgttctgagcgaagtatttcttcactttgttaggcaggttctttgccagttcttcaccttcccagatagtgttcagcaagaaagaaccgttcttacgcaaaccacgggttacatcgtacatgtgcagataagcctgtacgtggcaagctacgaagttcggagtatttaccaagtaagtagaacggataggagtatcaccgaaacggaggtgagagcaagtgaaaccacctgatttcttagagtcgtatgagaaataagcctggcagtgcttgtcggtgttgtcaccaataatcttcacagagttcttgttggcacctacagtaccatcagcacctaatccgtagaatttagcttcgaacatgccttcaccgcccaatgcgatttcttcttcctggggaagagaagtgaaagttacatcgtctacgatacccacagtgaagtggtttttcggcattggcagagccaaattcttgaatacagcgatgatttgagcaggagtagtgtctttagaacctaaaccgtaacgtccacctacgataaccggggcgttttctgttccatagaagcagtctttaacatccagatacaaaggttcaccgtttgctcccggttctttagtacggtcaagaactgcgatagtcttggcagtcttaggtacagcagccaagaaatgtttagcagagaacggacggtataagtgtacagaaaccaaacctactttttcacctttgctcatcaagtagtcgatagcttcgcgggcagcttctgtaacagaacccattgcgataattacgcgttcagcgtcttcagcaccatagtaatcgaacaaaccatgaggacggcctgtgattttgctgatttcgttcatgtattcttctacgatagccggaacagcttcatagaagttattgcaagattctctgtgctggaagaagtgatcggggttttcagccataccgcgtgcaacagggttgttaggattcaacgcgcgttgacggaattctgccaaagcctgttgatcaatcagacctgccagatcttcattctccagcatttcaattttttggatttcgtgagaagtacggaaaccatcgaagaagttgacgaatggcacgcgagatttgatagtagcaagatgggctacagcagccatatccataacttcttgtacagaaccttcgcacaacatggcgaaacctgtttggcggcaagacatgacgtcctgatggtcaccaaagatacacaatgcgtgtgaagccaatgtacgagccgatacgtggaatacgcaaggcaggaattcaccggcaattttgtacatgttagggatcattagcaacagaccctgagatgcagtgtaagtggtagtcaacgcacctgcctgaagagaaccatgaacagcacctgctgcaccgccttctgactgcatttcttgtaccaaaactgtttcgccgaagatgtttttacgacctgcggcagcccattcgtctacgtattcagccatagtagacgacggagtgatgggatagatagcagctacttcagaaaacatatacgagatatgtgctgctgcctggttaccatcacaagtgatgaattttttttgtttagtcatacaattactaattattaggtaataaaatctattctctatctcttaatataaaaagccgaaaagccataatgggatcatatttccgtgtcctaattccaatttgtgtagggcataatacacgtttggattatttttgaacttgcacccttctgcgcaaatacggaaatgcagtccgttgtctaccataaatgaagtgcctttatcgcctttatatagtttatggtccttatacagggtattcatgaaaaatgtatccagaacatcctgttcttcgacctttaccggataaatggagtacatcaggttggtgttgtgcatcatcagtttggaaggtttcttgggaaattcctctcccttgggataaaccatattgataagacgcgcatctgccagatacttaatgtaattcatcaccgtggcacgtgaagtttgaatctccgtggccagctggctgacgttcggagcaacgggtccgtccacagctagcaaatatagtaatttttttatctttgaaagatatttcagctcaatttgtttgataagaagtatatctacttctatcatcatattcatggtttttagcagattctccgaaaagttacgtttttccaggaagaatgggtagaaaccgtgatgcagatagtcttgaaaataatccaacggcttcacattgcgcaggatggttttcgctatctgttcgtgattctccaaaatttcttgtaaggtataggcacggaaacaattaccgctttgcagattcagatattcgcggaatgagaaacctctcaggtagtataccttggcaatgccgctcagttctggattttcttctttcaatcgcatcacggatgatccggtgaatataatcttcagagtaggaaacatttcatagcaagcacgcaggtcgtggctccattcgggatacttgaacacttggtctatcaacaaaacttttcctcctcgttttacgaattctgcggcaaactccactaacgtatatttagagaagtaaaagttattcatgttgatgaacagacatgagtgatccgttccgaacttttcttttgcatattgcaggaggaaagtcgttttccctacgccacgagtacccttgatgccgatcagtctgtcgttccagtctatttcgtccatcaagtcccggcgaacaggagcatttgtatgttccaccagataactgtgtgttctgtaaaaggtttccatggttgcttttttatcggttgcaaatatagcaatactaattcaaattgcaaactggagatagcaaaatattattttttttcaactaaaagacgaacaagagaaatggtttgtactctaaaacatttatctttgtgtccggaaatggaagcgctttatttattcaatccggaaaatgatatggcattggcttgtggtgatccttattatatggcacctgccagtgcccggcgaatggcggccgagctgtccgtgttgcctgcatggtatgcagaacagggaggaactgtatggctggattctgctctgcgtatgaaaacaatggaaagacaatcttttttgccgctttcggtcaattggacttcagaattcctccccatttataataaggtgattccttggggatggaatccgtctttggtgcgtcgtttgcaggaagctggatttcctgatacagcatatccttcagtagagcgtatgaagcgtatccgtcaaatatccggacgtcagacggctgtaaaagtgttacgacgcctttgtaggcatataggtgggaatattcccacattgggggaggcttttgtattgtcatcaacagaggaagtgaaggcttttgtgttgtctcatcctcgtgctttgttaaaagcgccatggtctggtagtgggagagggatacaatatgtttcaggtagttttaccatccctctggaagggtgggttcgacacatacttaccactcagcatgaggtgataggagagcctttttatgataagcttttggattttgccatggagttttttgcagacgagtgggaacaggtacattttatagggtattctttatttgaaacagacaagagaggtgtttataaagaaaacttgttggctgcggatcgggttattgaagcgaggatatccacatatgtttctgcggaaatcttacatcaggttgggaggatgttacaggtagagttggcggaagttataaaagggagttacgaaggctatctgggggtggatatgatgatatgccgtacccaaaacggcgggtatgccattcatccgtgtgtggaaataaatcttcgtatgaatatgggagtggtagcacgtttgatatatgataactatgtgtgtgatggcgtgcagggacggtatgttatagaatattatgcaaagcccggtgaggcatggcattctcatcttgcgcttcaagaaaagcatcctttatatttggaaaatggaaaagtgaagtcgggttatttgtcacttacaccggtagagaacaatacgtcttatcaggcatatatcttaatttgattttccggataaaggaaaatcaaattaagaggggatggttaccatccaccccctaatgctttatacaattttactaatgtaatttgtttgtctcttattgcattacttaatcctatttgtgcatcgaaatagctacgttgtgcatccaatacatccaaatagcctattactccattgatgtattgcaattgggccagttccattgttgctttagaggaacgttccagttgcagacgcgattcgtagatatcttttatcttattgaagtccacaatggcattgcgggcctctttgaatgcagtcagcactgatttttcatagctgtagcattcctgttcgtatgcggctttcttagcctttagggttgctctgtattttcccatggcgaagagaggagtgagaagattgccactgatataatgaatgggtgatttaaagaaatcagagaattcttcactttctacgccatattgtgctgtgaggctgagtcgtgggaatatattggtataggcaatacctacactggcattggctgctattaatttctgttctgcttcgcgtacatcgggacgacgttccaacagagtggagggtagacctactggtaatgtttcaggtagttttacctcttcgggtagaatggaacgctgtatgcggtgcgggtattcgcctgccaggaatgcgatatcattttctttcaatgaaattttcctttccagttcaggaactaaagttgcggtacgtgcatactccacttgtgcctgttgataggaagtttctgaagttagtcctccttcaaaacgaagctttgccaggcgtactccttctttacgggcatagagtgtttgacgaacgatgttcagctcattgtctaatgcgaccaattcaaaataggcttgtgccacttcggacacaatactcattttcaaagcacgttgcgcctcgatgcttcccagaaattgtgctatgcttttgtcttttgcccaacgcaggttaccccataagtctaattcccaagtcacggtaagtttaccaccctgttcggggtcatttttatagttgtcaccaccataattacttccttctttttgggcataagcgcttccgttcagttgggggaaaaggttggcaaagtctatgcgcttcattgcggcaagttcttttacacgtgccgcagctattttcatgtctttgttgttatccaacgtcttttctatcaggctttgcaaggttgtgtccgtatagatttcccaccattgcatatcggctatagataatgtatcctgttgtcgtaatgtatctaattgttggggaagatgtaagtcgggacgtgtgtagtgcttacctaattggcaagaagtcagcaaagtcattcctgatacggctatatataataatgtatgtttcatcatttctttcatctttttatatccttatttttgtttcatcttcgctttcatcttgtatatcagtacaaagaagaaaggtactaacaaaattcccacagttacagcaaagatcattccgaagaatacacctgtaccaatagcctgacggctggctgaacctggcccgctggcaatgaccataggtaacatacctaagatgaatgccaatgaagtcatcaaaataggtcggaaacggagctgtgaagcatgaagtgcagcttgtactacatctactcctttgtctacttgttctttggcaaactctacaataagaattgcatttttggcggctagtcctaccagcatcaccaatccgatctggaaatagacatcattctccagtccacagccccatacacctagataagcacctaatgcggctacaggcaaagagagtaatactgcaaccggtaccatccagctttcgtataaggcagcaaggaacaaaaatacgaacatgaacactaatgccagcaccatgccggtctgtccacctgcctgtttttcctggaaggatagtccgctccattctacaccgatattttccggtaggtgttcgcgggctatttgttcgataatttccatagcctgtcctgaactgtaaccgtctgcggcctcaccgagaatcacagaactgttgaacatattaaaacgtttgatgctgcccggaccagtggtatacgaagtggtacccagcgaggtgagcggtatcatggcattgtctgtaccccgtacaaaaaacaggttgatattctccttatgttcccggtagggtgcttctgcttgaatatatacacggtagatgcggttaaacatattgaaatcgtttacatataccgaacctgtataagctttcatagtcgagaatacatcggctaaaggtactcctgagaattttactttgtcacggtctacatcaaaataaagttgggggatatccgcttgtaaagccgaagataaacctgataattccttacgttttgatgcataatacatcaatgtatccgtagcttgtaccaaattttcgaaagtggcatctccacgtgcttccaattgcatttcgaacccgcccgaactgcccaatcccggaataacgggaggggtggaaagatataccttgcattcggggtattgtgacatgtctttttttacctgtgccataatattgtcaatagtttgcgagtcacgttcctcccaaggttttaagatgacagtcagttcacttcgtgcctgactggttcctacacgcggactgcttcccgccacactttgcacatattccactgccggatttttcatcaggtattccacagcacgttctgttacgatacgtgtacgttccaacgttgcaccttcgggtagctccaactctattttaaaatacccttggtcttcgatggggaggaagctggtgggaatgatgcgatggattaacaggatggcgatcaataccatgccgaatgtgctcagtacccgacgcgggtgtttcacaatgtgtttgataagccctacatatttatgattgccgatagccagccactcattgatacggcggaatacgatattctttttcttgttcggatcttccggtttcaggataagcgaacacatgactggactcaatgtcaaagctactaccgtagacagcaatacggatactacgatggttaccgtaaactggcgataaagttgtccggtaattccacctagaaaacttacgggaacaaatactgctgccagtaccaaagaagtggcgataatggctcctgtaagtccttccatagctttcttggtagcttggtagggagatagtttctcctcttccatgatacgctccacattctctactaccacgatagcatcgtccaccacaataccgatggcaagtaccaaccccaacagggtcaggatattaagcgagaatccgaaaatcaacatgaatccgaaagttccaatcagtgagataggtacggcaactagtgggataactgttgcacgccagctttggagtgaaaggtatactacgataataaccagtatcagggcttcaaacagtgttttgtacacttcatgaatagattccgaaatatatgtggtcatatcgaaaggtatctcgtaactcattccttcggggaaattcttgctgatttcctccatagcttctttcacgctttttgctacttccatagcgttggctcccggtaacatatagatggccaataccgctgcattttctttgttaatggcactctcggtattgtatgattgtgcttcgagtgagatgcgggccacatcacgtaaacggatgatggaaccatcggcattggcacggactacgatttcctcaaactggcttacagtagatagacgtccctgagtagtgatgggaatggttacgtctaatccttgtacgggttgttgtcccagtacaccggctgctgattcccgattttggtctttcagtgcattctgcagatcggctacggtcagaccgaaattggccagtttgtcgggctgtacccaaatttgcatggcgtaatatcggcttccgatgtttgaaacacgtcctacgccagggatacggcggattaggtccagtacattcagagtagcaaagttgctaaggtatatttcatcgaatttcgggtcggtagaggtaaggcatagggttagcaattgactggcagcctgtttctctaccgaaataccattttgtataacttctgctggaagacgtgattctgctaacttgatacggttctgtatttctactgccgccagatcgggatctgccgagatatcaaaagtgacggtggctgaaaaacctcccgaattggaactgtttgattccatgtaaagcattcctggagtaccgttcaattcctgttctataggagtggctaccgcttgtgatactgtcagggcactggcacccggataggatgcgctgattttcactaccggcggggtaatctgcggatattggtcaatgggtagcatcgtgagaccgatgataccgacaatgactattaatatggagatgacagctgaaaataccggtctgtctataaagaaactaactttcataatgtctattgtttttttgaatgcgtaaattttcctccataggggaattcgtattcgggagtgaaattatccgatcgtatctttttcctccgtttttttgtcttctacagcaggacttacttttactttcatgcctggattcagcttgtggtatccttctataacaatgtcttctccgggagccaagcctctttccaccactacttgattctggaattcaggtcctaattcaatgaaacgtctctctactgtagaatctttgcgcattacataaatataggcaccgcctttttctatgataacggactttaacggaactaccgtagctttttctctgacatccaataatagttttactttggtgaactgtccaggaagtaatatccgttctggattcggcatttcggcacgtacggagaatgtacctgtgcgtggatcaacttgcggttcggcaaagtctaccagtcctttgtatggataaatagtattgtctgctagagtaatggaaacattgggttgccaagagcgggtagagtctttttgacctaagttcacattacgctctttgcttttcagatagtctagagctgtcatgctgaaatccactaatacagtatcactttttactacggtggcaagcagtgatttgccacttggacctaccaatgtccctaaatccacgtggcgttcactgatatgtcctgctaacggagaacgaactatcgtataacctagttccagttctgcttgatcaaggtcggcactactcatagctaccgaggcttctgctgtttcatatgcagcagtagcattgtccaagtccaactggctggcagcattttgttcatatagcggacggatacgttctaaatcgcgttttgctttttgtgcctgtgcttcatcttttttcaattgggcacgcgctttgtcagctttggctcgatattgatcttgattgataacaaacagcacttgattcttagtgacatatgtaccttctgcgaaaagcatttgttctaaatatccctctactcgggcacgtacttcaacgaattgctgtgcacgtacgcgtcctacatattcaccatatatttccacatcgtcttgcgttgccggtgctatggcaactactggaagttccggcatctttgccggtcgatgggaaacaatcaggtaaatcccgataactagtccaatacctattactacaagcgctgttcttttcttttttagcgcaatttctttgtgtgtaaaaaatagtttcatactttagttttgttattgtttaagatgccgtcagtaggaatacaagcagcgtgccaaactactgtaaatagcctttccttttcataatcagtgttttattactgccttttgttgatagggaaagtgtggaaaacaggcaacagctgtagaataattccacagtaggcgaattaaatttagtagaggattatcgatttggatgcaaaaatagtaaaatagtgggtaattttaaaatatttattcattattcattatgatgaggacgatgttgtagtgttagcagatatgtatgtaatttaaattttgcttgagatcgtcatatctgcaaccttgttgttttgaaatacgctccctttcattttgaaaagggtagtgtttcccttttttttatgacttcatataatatctgtttgtttatcaatagtttataatgttgtttttcattttggcatagtattcgctatatacttgtcgaatataaaaggtataaaaagatgggagaattttataatccagataaattatataaaggtggaagccggaataatagcttgataaataaaaaaatgatattccgtgtattgggggtattactttttattgaatctgctatgttcctgctttgtgcggctgtttccttatgttacggtgagcaagattatcaatattttctatataccattcttttgaatacattggtcggtggagttttgctaatttgtagtagaggtgctgagaatcggctgacacgacgagatgggtactgcattgtaacttttacttggtttttgtttacgttgtttggaatgttgcctttttattttagtggaggaatcccttcggtgacggatgccttttttgaaaccatgtcgggttttactactacaggagctactatattggatgatatagaatctctttcacatggtctgttattttggcgtagcttgacacaatggataggtggcttgggtattgtcttttttactattgctgtgcttcctattttcgggggaggaactatacaacttttttcagctgaggctatcggggtgacgcacgacaaaacacatccccggattgatgtgatggctaagtggctgtggatgatatatgctattcttacaattgcagaaactgtgctgctgatgataggaggaatgagtttttttgatgcggtatgtcattcattctcaacaacggctacaggtggttattctaccaaacaagctagtgtagcttattggaactctccgtttatagaatatgtaatagcgatatttatgatcctttcgggtattaatttctctctctattttatgtgtctgaaagggaaaggcaagcgtttatttcaggatgatgaattccgttggtttatgaaatcagtgagtattctgacacttgttattacgtttgccttagtttttcagaatcattatgattgggaaaaggcattccgcagggctctgtttcaagtagctacggcgcatacgtcatgcggctttgcaacggatgattataacttgtggccatcttttacatggatgcttcttatttttgctatgttgtcaggtggatgtacggggtctactagtgggggaatcaaaaatatgcgccttatgattctggcgcgtaatatcaaaaatgaattcaaacggatgctgcatcctagggctgtattgcctgttcgtgtgaaccgtcaggttatatcgccttccatcattgcttcagtgaatacattctttgtattttatttgttctgtattttggccggatggatactgctgatgtttttcggggtggggataattgaagcgatgagtacagtaatttctagcttaggcaatgtgggaccggggctaggagcattcggtcctgctttttcatgggcggcgttgcctgatgctgctaaatggatattgtcgttcctgatgttgataggacgtttggaattgtttgctgtgttgttgcttttttattcaggattttgggaaagacgatagttctccgggaaaaattgatatgtatcatttaattaatgggtattcattgaaatgaagttctagaaatatgtatttttacaaaggatgatatatatttgtgctcggatttacaatacattcatgttatggcaacttcgagagagatgacttcgggacgtccgttccctttgatattgaattttgcttttcctttattgctgggtaatttacttcagcagacttattccttgatggatgctgctattgtgggtaagtttcttggaattaatgctttggcttctgtaggagctagcacttcggtggtgtttttgatattaggcttttgcaatggctgttgtggtggcttcggtattcctgtcgcacagaagtttggagcaagggattatggtatgatgcggcgttttgtggcagttagtttacaattggcagcggtgatgtctgtagtaattgctattgtaactagtatgttttgttcggatattcttcagatgatgcagactccggagaatattcttgaggatgcttatctttatttgctgattacttttatcggggtgccctgtacctttttctataatttgctttcaagtattattcgtgcattgggtgatagcaaaactccgttttggtttttgcttttttctacgatattgaatattttgcttgatctcttttgtattttgatacttgattggggagtggcgggagcagctgtggctacggtattctcacaaggggtttcggctgtattgtgttatttgtatatgatgcgtcattttgagattctgaagggaactccgacagagcataaatttcgaggagcgttggcaaagactttactgtatatcggtgtgccgatgggattacagttctctattactgctattggcagtattatgttgcaaagtgcgaataatgcattgggtactgcttgtgtggctgcttttacggctgctatgcgtattaagatgttttgtatgtgtccgcttgagagtctgggtatagctatggctacttatagtggacagaattacggtgcgggaaaaccgaagcgtatctggctgggaatcaaggcgagtgtgttaatgatggttatttattgtggttttatgtttgtagtcttgatgttgggagcacgtacttttgccttgttatttgttgacccagcagaatgggagatattgaaagatacggaattgtttttgcatatttccgtttctttctttccggttttgggcttactttgtatcttgcgttattccattcagggggtgggctttactaatttggctatgttgtcgggggtatccgaaatgattgcccgtataatggtcagtctttatgcagtaccaatattgggctatttagctgtttgttttggtgaccctacggcatggatatttgcagttatttttctgattcccgcatttatatatgtgtatggaagaataaaacggatgtctacttcaggaatggtaaaatactaatttggtgtgtgaggtgctgaaaaaaactttcagcacccacagataaattttctgagcaaaaactattagaaattacttttcttttctacaaaaattatttcttttgttacagggtgaacaaactctagactttcagcatgtaaataaagtctgtctgctttttgtccgtagagttcatctcctcgtataggacaatgtaatccttccggatgggcggcatgtactcttaattggtgtgtccgtcctgtcaatggataaaaggcaataagtgtgtttccttcttgttcgtttaaaacctgatattgtgtgatagcggtttttccatgttcatggtctactacttgtctgggtctgtcaagaggatccatacggagggggagtattatggttccttctttagaagaaatcttgccatccaataaggcaatatatcgtttctttatcattctattcttgaattgtgcttgcaggtgctgatgtacttctttgtttttggctattaataacacaccggaagtagccatatccaatcggtggactatcagaggacctgtggcatctggataaagtatttttatatgttgatagacagagtctatttctccttttcctggaaccgagagcattcctgctggtttgttgattacgactaggtaattatcttcatatactatctctaatggcatttcatgataatgtttttttaacaagggattttcttccacttccagtccctgtaacatatgtcccaggataggtccgcattttcctttacatgcaggatagtagtatccatgatgtcttatttctgcttttggagaatctccccaccagaattctgccatagcaataggttttaattgatgcttataggcatattggagtaatttgggagctgcacattcaccggctccggcaggaggaaatttttgtatagtttgtgcaaaaatacgacataaatcttttgtttctccatgggcgtttagtatttgaaactgctcaaacagctttctttgtaaagtggcagaacgttttttcctttctatcttcatcgtttctatttttgtgatgaaagtatcggcttctgcttgtagtgaagcgattttttctttccatattttttccatgcgttttaattcagctttttgaaactggctttcacgtatcattgcagctaactcctttgcgtcgggaattcctgtcttgcgccggatttctctgttttttttagcggatttgaaaaactctttagcttcagtcaattcctgctgggattgtattttttctttttcaatttgtcggagtagatctatgtaacgagggtcgttctgtgtctttttaatgcatacattgatggcggatatacgtttttcctctattttgaagaatccctgtggttgtaacaaatcataaattggcgggacgaagaaaggatgacagtttttaccagccaatgttcctgaaaatgcagccaaataacctattttattctcgggtgtttgtacaattaggacaccaaacatttttccttgttgcaattctttttgccattgggattgacttgtcagataggcttgtacttctttagtcgctattatgcaaagtggatgaggggtatagtgaaaaggataagtgaacttatcgggtaactttatagtggtaatggaattcttaaaaaaatgtatcatagttcgtttaatatagttgctaatgatttgtttttcttgtgaggtcactatgcggacaactcggaatgaatgataaagtttttgtttaattcctgtaatacttcagttgactgcttttcagtctgtaaggggaatatagagatacgatttaaagttaggataatatcgcgttgagatttgcgaagttctattatttttataagcgtttctttctctctttttaccatataattcccttctattttgttcgtgtctacattgttccctattttgaaatcgctagttgtttttatgacggttgtttgttctttgtaatcagatgccgcaatatgatttttttttctgtctaattttatttccatagctacacttttattttgcgattttatattcttgggcaaagataggcattttctttccaataatctttttatgttgtgcaaattcattacagatgctattcaactgttttttttcgtatttttgccgcaaatttataagaaaaattggatgttaatttgttgttttggataaaaagagaaaatagatatgagaaaattgttgtgtccgcaatgcaaaattgcagggttatacgttaaaaatgagaagaaagaaaggttgttagtttatgtatcggatgaaggggaagtggtaccgaaaaatttggaagagaatatggaagggtttgatttaactattatttattgtttggggtgttcatggagtggctctccaaaaaaactggtgaagaggtaggtatgaaaggaaaacttaaaatctcatttattggtgattttagacgtgttcgataaattgttgttgaatgataaattgaactctaatttgcccattgatgatttgcacttgaatggggctggatatcggatattagtttatactttgagagtgttttatgttagtagggatgaatgaaaataattgttgaatttaaatataggaatagcgatgaatattttattggtgagtaatagtgacatatgtcgtagtcgtatggcacagaagatattatcttcttttggatatgggacaaagatatttacctctggagttctgccgggaagagtggtaccatcttcagtggtaggggtgatggaacagaatggatatgattgctctcgtaagaaagctagtgatgtggatatatattgccatcaaccatgggactatgtgattactctttgtgaagaagcaaaggaagtggagggtgattttaataaggaagtgaaaaactggaagcatttttcttttgatgacccgtttcagcatatttatgaggatgaaacagaattggaacatcgtatttccgaactttatgaaacgatgtatcgtgaattatatgagttttatcgggacgaactgagtgagcaattattgccacgttgcacttgtggggctaatacctattgtcgatgtgagtgaaccagtaatgtcccataagtgtttggacatgttgacgcatccattgcgcttgaaggtgattccttctttttccaataattctttttgtttctgccagctgggaactagtcttccttggctgtttactatccggtggcaaggaaggtcttcttcttttggtgcatgagataaagcctgtcctaccattcgtgaatattggggattacctataagttgtgctatttttccgtaagtaaaaacattgccgtaggggatttcttttgtaatgctatatacttctttataaaactgtgctctgtccattctgtttattgatgaatgaaatgcttgatagttgttatgggatgaaaaaaaaacattcgtggaccagcataccgcattacttcttgtattcgtttcttcatttctggtttataacaatgtatgggacagttgcggcaagtctttttttgttcaccaaatgtacaatgctttaaccggttatgtgcatattgcaataactgccgacaggttgggcaaagctctttattgccttccttgtaccgacaataaattcggatcatttgttctgcggtacgctgttctctttcgataattctcatctgtaatgaagttttcgtgtgaataaagtgcaaatataggactattttttcttatttttgtattcaattagtgtataacctttaaaacaaagagataatggataaagttgttgttaattcgtacgaggattttgagaagctgctaggacggcagattggaatttccgactatgtggaagtgtcgcaagaccgaattaatctttttgcagatgctaccttggatcatcagtggattcatgtagatacagaacgtgctaaagtggaaagtccttatcatagtactattgtacatggttacctgaccctttcgttgcttccacatatgtggaaccagattatagaagtgaataatctgaaaatgatgatcaactatggtatggacaagatgaaatttggacaggctgtcctagcaggtcagagtatccgtatggtagcaagtcttcattctttacagaacttgcgtggcgtagccaaggctgaaattaaatttacaattgagataaaagaccaaccgaagaaggcacttgaaggcatcgctatcttcttgtattatttcaattgattttatgagaaataatctccgaagaagaataaggtgtatttttatcgttcttggataaatgttttacccaagaacgattgctttgttttgatttttttagacacgtatatatcctttgggggaagttagggattaacaaaattaatgatgaaatagaataggcatttgagattgtgtaaaaatgaaaaacttattttaggttgtttttctctaagtaataacacaaatgatcatatattttgtcatcatagctaacttcggcttgatggagaatgccttcgtatgtaaaccccattttctccaaaacatgttgtgaacgtttgttttgaggataacaatttgcactgatcaaggttaatcctagtttgttgaagccatagtccaagacagcacagacggcttcagacatatatccttttccccattgggcttcatctaaccaataacctatcattccggcatttgaattctctctctttgggtctggtagaattcctatagctcctatcagaagccggtcttcctttctagtgatggcccatgtgtctttttgtggtataaatattgtttgaagaattttcagagattcttccagtgtgtcatgaggtttccaaccagcattatttcctaggttgggattctggcaacagttaaaaacagcttccgtatcattctctgtaaaaggacgtaaaataagtcgctcagtttctattacatgatttccctcaggagggcattcctgctcttttttgtaaacacactctatccggtttccgtctggatctagtatcacactttcaaaatagccatctcctgaaatgcgaggttcacctacgatatggtatcctttagtacgtagctgttccgttagtgataagacagctttttggctttcaaaagaaaaagctagatgggtcaatcccggtctgttttcttctatcgggatattttgcacgtcaatcctactcatcaactctaatgtagcaccactttcaaatgaaatgaagtaagattcaaaacctttttgggaattaatgtatttttcattacttgttccgttaaagtaacgagtataaaattcccttagcttttccagatgaaatgtccaaatggcgatatgatgtattttcatgagtgattatttattcattatagatattttctttagttcgttttattctaaataaatcatctttttggtcattccaccatcgatgatgatattttgtccattgatgaagtcgttctcttcttgacataaaaataaacacatacgtgctatgtcttctggtttgcctactcgtcttgatggatgttgggcatgatcttctgggcgtagccgttcgtaatcattggtctgaatccatcccggcgaaatacagtttacggtgatatgaaagtcggcaagagataaagcaagtgcatgggtcagtgaatagattcctcctttggaagccgcatagctttcgcttcccggttcgctcattaaataacgggtggaacagatattgataattctgccatacgggtgattttctgcttgggatttgcgatgcaaagctaatgtgcgtgaggtgataaatacagggcgcagattgatggacaaaattttatcaaaatcttccacgctggtttccgtgatgggagaaaattcgcttattccggcattgttaataatgatgtccatatccccccacttttcaaaaagctcgtgcatacagttctcaagggattctttattacttacatcggcatgataaaaaattgctccggtctctttggctgtctgtattcctaaatcctcatttttgtcacaaaaggcgacttggtattgtgagttgcagaaagctttcacaatgtttctccctatgccatcggcacctcctgtgatgaatgcttttctaggaagtttgattgtattgtctgtcaggtcctttggttgaagcttgacggaaatcgttttcttctttccttgtttacattttttttcccatgcagcctttcgggcttcatattgttcgtattgcctttctatataattgtctgccataagttttgaaatatatttatcggaatgttattctattgtttaccataaaattaacagctccatatattattattccaataaattgtgctgtaaattctttgattcctattgcttctatcatcagtatcacaaaaagaagttgtatgccataggcaataccaaaagcggtacaaaagagcattatttgttgccaaagactgttttggggattgctggaaggaaaaatccaatatttgctccatataaaattatgggtttgagcgatgagatatgccataatatttgctactatatattttcctttgaatgagaagtaactcatcacaatccatatcactaacatggtaataaggtaatttaaggttcctattgtagcaaaacgaactaaacgtactgatgctttcatcctctttttattggtttgttttatatggtgaatttgggtacaaaaatactaaaaatatgtgattttaatgcttgtataataaaaaagaagcctactcatcttagtttctgttttaatgttgttcagcattttttgaaggaaaatttaaactggcttttttcagttttgtcctgaatttgaagttcaattgtaatagaggtggactttttttaggggaaagatgggaagaaacgctgaaaagcatggtggaaatccgcagaaagtgttgatgcaaatatgttgattttatgacaatcggacaatatataaggcacacttttatatcatgcaaaataatagcatgttatagatgtaccttataaactgtctgattgtaaatattcaaaatctgtgattaatgaatttcgatgactctgttcactttggctttttcttcaggagtgcgtttaggcaaatcaatggtcagaacaccattgctggcattggcgctgattttttccttaaccacatcttcaggaagaatcaaagcttgttcgaacttagagtaagaaaattcacgacgtaaatatcttctgttgtgatggtcgtcctcttttatttcattctttttctccattgagatcactagttcgttgttttcgctgatgtggatattgaaatcttctttagtcatacccggagcagcaacctctactttataatctttgtcactttcaatgacattaattgcaggggcggtagcgttggctcttgtcaaccattcattatcaaagaaatcgttgaaaatacttggtaaccaattctgattgttatactttctagtcggcatcataattataatctcctatattttaaattgttactagactgctttttgatttttttatcttgtcgtttttggaaatacactgatgttcttgcaaagtatatgcctgatggcaaaatgtcagccggaaatgaaatgaatttaaatctgtgaagataattttaatgaatatcgagatgtgtttaaacctttgtaaaatttgtttgcagttgagaagcaaggtaaagtgataaagaaagccattttgtcagcaaatggtggctgttatttatgtttgtatattatctttgcgtcgttttataaagataaccattaaagaagaaaaggaaatatcatgttggcatatacttatattaaacagggaaaatttgaattgatagagaaaccgaagcctgagttgagagactcgcgtgatgctattgtgcgcgttactctcgggagtatttgtaccagtgacttgcatattaaacatggtggtgtgccacgtgctgttcccggaataacagtggggcatgaaatggtgggtattgtggagcagacaggacgtgatgttaaattagtcaaaccaggcgatcgagttaccgtcaatgtggaaaccttttgtggagaatgttttttttgccggcatagatatgtgaataattgtgctgatcctaatgggggatgggccttgggatgtcggattgatgggggggcagacggagtatgttcgcgtaccttatgctgatcaaggcttgaatctcattcccgattccgtgagtgatgagcaagctttgtttgtaggagatatccttgctacaggattttgggctgctcgcatttcggagattaccgaagaagacacggtgcttgtcattggtgcgggacctacgggaatctgtactttgctttgtgtgatgctgagaaagccgcagcgcattgttgtttgtgaacaatcctctgaaagaattcggtttgttagggaacattatccgcaggtagaagttgtcactccagaagaatgtaaggaatttgtattgcaaagtagtccacacggtggtgcggatgtagtttttgaagtggcaggaggggaggatacatttcgcttggcatgggaatgtgcgcgccctaatgctgtcgttattttggtggctctttatgaccgtcctcagattcttcctttgccggatatgtatggaaagaatctaaccttcaaaactggtggcgtagatggttgcgattgtgctgagatacttcgcttgatagagatgggaaaaatagataccactccactaattacacatcgtttcccgctagatcagatagaaacggcttaccagatttttgagaaccgacaagatggagtgataaaagtagctgtgacaatggagactggaatgtagattaaaagcaatgaaatagcataatataagagtgtatgcctattattgaaatatcatcattgacacatcctggagtggatgttttctgcatgttgacggaagctcagttacgtcagcgtatggaacctgggaaaggggtgtttatagccgaaagccccaatgtcattagtagggctttggatgcaggatatgaacctcttgctcttatgtgtgagcgtaagcatatctctggtagtgctgctcacattatcaagcgttgtggtgatgtgcccgtttatacgggtgatagagagttgttggctacgttgactggctatgttctgacacgtggtgtattatgtgctatgcgtcgtccggtgttgccctctatggaagagatctgccgggatacccggcggattgtagtcattgacggtgtggtggacactaccaatatcggggcgatattccgttcggcagctgctcttgggatagatgctgttttgttgacacgcaattcttgcgatccgttgaatcgccgtgcggtaagggtgtctatgggttcggtgttcttggttccatggacatggttgaatggtacgattggcgatttgaacaagtttggtttccgtactgctgccatggcgttgactgatgattctatctctatagatcatcccatattggcggctgaacctcggttggctattgtgatgggaacagaaggggatgggcttccttacaagacaattgctgaagctgattatgtagtccgtatccctatggcgcatggagtggattcgctcaatgtggctgcagcagctgctgttgccttttggcaactccggattacagacctttgaaaagattaatatatgattaagtttattttattttcatagctcccatggcgtccgggcagtctgtgggggccttagttgtataggcataaagcgtatcatcacgctgatgtgtggtcactaggcgcagaccatggtatatcttcagcgtgtcagcatcatagacaatttcgacacgtttgcctatatactctttcggcatgctgtaatggtgaagcttgaaagttacatagcagttccgcattaccgttgcagagcgctgctccttcatctggtggcgtatggcgggaagtgggcggaggtactcggcttcaatctgttcgcgtctggacagggaacgtccgttcatcctgcgcctgttaaaggctgagagcgattcgaaaatggccacattcaaagattccagagagttgaacacaagctcttcgacatctgcatatactgccggtaaagcagtttcacggcattttcaaccaacgccttgtccttgggatggcgtacccgtgcggggtatacggtacatccataatgctcggaaaatgccgcaaactcctcgttgattaccggaccgttgtggttgctgcgggctactgctgctttgaggttgtcaggtacgattgccatcggaataccgccgtaaaaatgaagtgcgttttcacatgccttgatcagatcttgttttgactgggaccagaccgcctcacaataggtatagtggctacaggggagtatggacacaaacatttcaacgctacggcattcaccgttttcattgtcaatgacctcaaacttgtcactggcaaagtcaatgtatatttggtcatcggcataatgctcaatatgccccacgacatgagtcaccatccggtaacgcatgagataattaccgaaactggcatgtttgtatccattagggcgtgttttgtgatactctttgtacagggatttgaccgttacccctcggcggctaagacgggcggagtactcgggtggaagtgcctccagctcaagttggcgttgtgatggaatctgactacggctaaccccttcggagaacatttcttggatgcgggaagaaggcattgatgccaactcctttatcggaatgccacacttttggaacagacgcacatatctgcgcactgtgttgcgggatagctcaaaactcctgcttatttgctttatctccatccccaatgcatagcattggagaatatttgctatctttgttgtcatagtagaaatggttttaccccaccggtcaagacgggaatcaaatctacgaaaaacacccctgtcggacaatgtttggcaggggcgtttttatattgtttttaaaggaaatgtctattttgacgaaagggagcaaaatcgcttggttttcaagggcagattgcgatggattttccaaatgctaatcgttggtaatcaccacttatctatgatgcaacatcgaaacatgtttaattatcagcgttttagcattttaatcggtacaaataaatttttgacaaagaattcattttctatgtacaagtgtaaacctttgtttttcagctttttgttgattttatttgtacagcctttcttcattcaaattttgtatatcagtaagcgtctcgtcagcggattttcccggttggcaagctttcttttaagcatatagcctagccagtctgaacatgaagaatttcacattagccacccctcttaactggcttcgaaaagctttgattgtagcattgaacgactccgctgaagcatttgtcaatcgttcttcaaaataatttatgatggtcgtactatggtttgaaaaagtatcaagtaccttgttgaactccatatagtcaaacttttccacttcattgtaccattttgcgagatttagccttgcttcatcgggacctgacttcttgttgaagatgtctgtcagtttcatgctaaggctgtatccttccagaagcttggggaatttatcaaagagaatggcagccctggtcttttgctgttcattccatttgctccagtgtttcagtataatatgcttgcttctgcttactatctgtggcagggtttctccgttctccattctttcaggctcccatttccctattctctccctttccgccttactctttgcttctttcttcttttgacggtgctccctgatagcctgattttccgcatcaagtactttccaccgatagcgtattcttaactggtcaacagcttcagacatgagctgctgtatatgaaaacggtcattgatcagctttgcggcaggaaacacctttctgactgtcagcatcatggctgaagataaatctgtagtgacagtcttgacagacagccgtttccggtgcggaagcctgcgcaagattccgcttaccgcatctgtggccactccacgaaccattgcaactaaagcccccttacggcctttagctgctttattggtcagaatcgtataaacatctccattgctcaggcaagtttcatccaaagaaaggttttctccaatgttttcaggataaaggaggtagtcatgcgcatgttcgagctgatcccagttccggtaatcactgattttctccttgtattgtttacgaggagtctgcccttttacgccataacgttccgcaagcacacaaatgctcacaggagtagattcaatctccttcttttaaaaaagaaacgaactcagaattcagccgtgtaccgtcaaactcggataaatcccagtcataactgaagatttcattggaagacctgtcaagccatttacgtttacgaacatggagataagtggcgcgaccacgaataggatagtcttggattgtacgatactcaccaaaaccataggatatgatatccgggttggtcttatcttcttttagctgaactttttttcatcaagataaatatcaaaacggtcagcacttttgtcgaaattgacaatattaaagttgtctataagcacatccggaaggatggcacgaaggagttgtccgggtttcataaaacaaaggtaagcaaagatagcgaattttaaaaattaccaaccagaaatttccgctaacccgaaaatccgggattgttcatgtatatccataattcctctccttccagggtgatcacaaccctggttgaaaaggatatggagaaaaagagagaggcgggaaaacaggagaaggtatgtatgtgatgatgctatttaagatagtagggcttatggtatgggcaatatactgaatttgttgtcgcccgttcattacaattagggtatgcgcatttataatctcctgttattatctcaagcatcgttgagcatgacgaaaacaaacagaaacttaagaataaaataaataattttgagttcatagttaaatgagttgattagtaatagtttttagttttctcttgtgaagactttgttgtttttaaaggaaaaagcttcacaatatataggatatccatatgtattaccgtttataaatggattttttaaaaatctatttaagtcgttgaatgttaattttatagatgcttcttggtttatatcggatatcgttaataaaataatttgggattcgtgtaatggtaccattgggattataatattcatccataaatgagtttttaaaagcttctaaaacattttggtatgaattattacttgctattacaaaataagcagtaacaccatatgttagtgttcgtatataaactaattcttcaagggaagagggaggggcaatgaataacccatctgagggtacatccattgagattgtgaatcctttgaatataacttcactaatacataggctttttatgtttttcatattaaattcttgttgtgctattttttttagtgcattgccaaactctttattatatgggaaacagttctctatatttgatagagattttaattctgcaaattttataatatatggtctttgaggtgaagtatagctctggaattctttggatttcagagcttcttttatcttttgtagatattcacttcccttaacatcttccatgcaagttatgtatggaatgggaaaattaaaagttaaatctattggatgtttcttatctatattttctctatcgaaagttgtagcgaaagaacttttaggaaatgttgctcctacatatatgtgaggtggagttgctaaacattcccatctttgtactcctatatattggttaccaataaaaaattcgtcatcatttttactatcatcaataagggtgtcccattgaaaaataaatttattttgaaccgtatctttagggttttgtggtaactgttcattgtttttatttactaaatgttcttctttctcacaagccataaagaaagaagtagttatgatatataacaaataaaataattttttttcattttataccatgcttttttagtttacattttatttatttatattgccataatatggctttaacaatgtgcaaatttatgcaatatatatgtaaaatccatttataatagaatttattttattgtaatgatttgatttaatcaattgattgtcagtagtgaatatagaaaaagacttgtaatatttatcttttttatttatttcattttcttgagaaagaaaggtaataatattggctccatcaggtgctttaattttctttcgaatattggtcttgtatctatgaaaatatgctttgcatccaaatagcagctatttcttctgttttaaaacctgcaatcatcatacaacatagctgcatttctttttcatttaagcatgaatagttttcctttaacatggagtaaaaattgtcaaaagataaatctatatgtttataaaaactgtttcattgtattgttaataggtcattatattttatgaagttaaatttttctatttcctttaaaagtttggcactttgttcttttttcatatatgtgtaatttattaaaatgaatatccaaaactaatataagggtaaataaatggttcttttgttacaccgtgtttatcattaaaactaaaagaagggcttaatcctattctaaatagaaaacctttagttgatatgtaacggtaacctatattagaaaagaaataatatccaaatgttgtattggaagttaaatttattgtttcatattgatcctttgatttttctataaaagaaatatgttcgttatatattccaagattagaacctaatccaagttctaatttgtgcttatttccagaggtgagaaagttgacttcgatagggaaaaatagccctctattagagttagatgctttaataaaagaatcccctccttgaaaataagaaacaccaagcctatatccccatggggatataggagtaaatcttgaatcgaaagaaactccaataaggttagaagatcctaaaaactctacatagatatttttatctcttgtctttttgaaagataaggtgtcctgtgcgaatatatttgcaaaaacacctatggcaaacgatgcaagtaaaaaacctttttttatcatataatttattgattttgaacgttgcaaagttagacttaatactttaaatcgccatttgtaagcctttttgttaacttgtaaacttaatatataactatttgatatttagggtatatcacaaaaaaagattgtaaaagtataaactgtcattggaatggaggagcagacattaaaaaagctatgatattagcaccttcaggagttttaagtttctttcggatattggttttatatttgtgtacagaaaaaatactttgcatccatatagctgcaatttcttctgtcttgaaccctgcaaccatcatacagcaaagttgtagttctttctcatttagatctgaaaagttatctttcagcagtgtataaaaattatcaaaagataaatcaatgtgtttataaaaattgtcccattgcgtagttagtaaagaattattttgtgtaatattgaatctatttaattcttttataaatttagcactttgttctttttgcgtatatctcaacatcgcaatttgtttggctacttcaaaatcacgtaaaatgaacatctttgcttcatcttttatattatttaatccctccaatgtttctatttgttggtgaagagccacaatttggtaagcttgttttctttttttattgatgtagattaatagccctatacttgctataaaaagagaacttaaagcagcatatttgtatgtagataatttcttttcataattttttttatcacaaaagtgggtatatgcttgaatagcttcatctaaagaacttccattcaaatttcttagaagaatttcatgtcgttctattgccttatacaggcaatcaatttgattatctgtattattattctctctagcaaattctgcacacagtttataaaattctatttcagcaaaattagtttccgggtctgtgtcatattgtatagctaattttctatgtttataagcatttgctaaatcatttatggagtgatagcaataagttagtatagaatggcagacaaacaaaaaatcatctgtttgttttaatgttatagcttcctgtaatttatcaatacataatgtccattgtttagtcttatataacgcaataccttgtaggcatttgatttcattataataaatattgtttttatcaatggaaatttctattaaattcaataactcataggcttttttatgatttcctatatataaaaagctttttgccatttgtacttgagttgatatatccatatccctaaatgcaatatctttaatacactggttagctaatgtttgatatttaataaatttcaacatattgtatttgtggatatacatatctcctagatagccatataaacaacatagccattctttatcctctatttggcttgctatatctatagctttttctatagcttgcacctccatttttaagtttttttcttttttgtatgttttggcaagaaacaaaagggattcaagttgttgttgaattagtttcttttttgtgaaaatatgaatacttttttgtaataaccctttatgtgggtaataattatttatatagtgatttgctaatgaaaccaataagaaatgagttgcttcttttgagttattaagattagtgacctgggttgaatcaattttagaaagatataatcgaggattattttctaagagtgttatttgattattaaaaaagtcttcttcctcattgttttgttggcaagatgtctgtactaacaaaatgatgataactaaaaaatatatagattgttttttcatagtattattaataggtttgattacaactcagtttttacatgtatttttccgaaagtcttttgttcattatgtacccagcacaattctccgataatcttctccaatgggaaataatcaagaacgatatattgcaggtcaaatccggtatgctcgaaataatccagcgggagtgaaacgaagtctttacggagtattccgtctgttttgcaatataattccagccattcggaggtttcgccacttattgaaattattatcttttcagacctcttctttggttgaacatcttctttcattgtcatatcgtaattttctgaacagaatatgctttatacttccgaaacatgctgcaaatatagcaaaatacattttctcacttttatttttagtgtattttttatttgccaaatatatattcacttaccgatgaataaagaatttacatccacttctgcgtcttccatcccaagcaccctctcgatatctttcagtattctggtataattgtcagatatttccttctccgtcctgaacgcgactaccggcagcggttcctcctccagttcgaacagcctgaacttcttcctgaaatgccctttgatattggaacggtttcccattccgataaattcccccggttccagtgaggcgaagtccttcgattcatatatctcttccttctgtgtgctgatggtcacgctggaattacggccgtcaccgctgctgccggaactggtggacttcttctccttctcgtatttcccgaaaaagagagggtaatatttcaatgcctccacatcctgtgtgcggcccagaaagatccgcacgctacatttgtaaaggaatgatcagtatagcaagaggctatgaaagaaacggtaaggaaaaagactaaggatatgacaaaaaaacgtcagagatatggaaagacagcttttcctttcctatttccgtattgtttcataaagtagcccgcctacgtctattccaatatcaaacttcttaaacttgtagcgtggtatgactattggagccacattccaacctttctccggattgtaataattttgtatgccgacttccatttccaaccggtctgtaaaatcatacccggcagtaatgccatatgtatttctataaaagccatactggtaagtcggtgtatatactccaaacacttttagtcttaatctttcatttgggtgataaatcattgcgccatagatgccaaaagcctgtccggtacttttgggaaagttatatttggtggcatttatgcccagtcgggtttcaaaatcattgttgaattgatgatgaaacattattgaagcctcgtttatccgtcctattcccggcaacgtggtttgtgagccactgccatagaaatgagagaaaatatgtccgcttgtactatagtccccataaaacattggagtaggattaatgtaatatagtggtatatagaaaggtctatccgctttaaaatttgtgttgtcaatggctgtttctacgtctttcgcattgggattgggcaataataaatctgtcttattgaacggcatacatactttatcaaagagaattcttgaactgtcatttttaagtttgatatggttctctctgatgttttcttgcccgttagcaccaaatataaacaggcagagcatcaatgttatatatatgacttttacaagttgcataaactgatatgatacagttatttattctttaaagtcacttttactttttctgtttggctgtgcggattataagtaagacttgcacatcctgataaatatataataacactggctaaaatagctattatgatatatttttttaggtttttcatgttactaatttttatatcgcaaaattaggcaaatcattctcagtttaaggtttatagttctgtatttcccttaattttcctaaattaaaagttcagattgtcaaatctacaaaagtttgtatacatttgtgtagtttaatatattaattatgaaaagaataatcgtttttttgcagtgattgtacagatggtgcttctttcctgttgtgttgagaaacaaggatattatgacagtggggaagaaagcattatcgcactaatatgtgatataacttggactggcggaaaaaaagagtatgaagacggaagctcttgggaatctatttggaatttcgataaagatggaacatatacacgagccaatgtagagattgataaggatgggaacaaaaaagaaggtgagattcgtggaagatggtctttcgccactcctaactttagcacattatattttggtggtagtcattattgggatattaaagaactggataagacaatcttttcattctacgatagaacaggagaactgaacgatccaactacgtctaaagaatatgttgaattttacccatacaatgatgggaaaactaattatacaacgtatttaattatcaaaaaatgcagttagacactgaaaagtgttttttagggagggtaacactccactatcgctttctttttgatattctataagtacaaaagttagaaagcccccagcggaaacgccggagccttataggcttgcgttagggtagcttgttctctgtatttctgatacaggagcattaggccccaaaattacttcgatattttgacgtaaacagttcctttacttgaaggtttatcctcctccaaacgaattgtataatagacataatcatcaataccatacttctcataccattttcgtggctctacttttgaatcacgtaatccacaaaaccagattccaccttgcaccgaaataccagaggtataacttataataggaatatcaaaaccatcaccaggtgtatacgtttccattagaatcttatgtctatccaagcgtaccgtatctgtgaacaatggcatattgtctactggtggataaaaacaagttaaacgtatgctatcttctttgtatggtgctaccataaaatcaagtgtttctacactatcgaccaatataaaatgtacgaaatcaggtaaaagttctctttctgtaaacacaccattgttgcaagatattttttttagcttggctcgtttcccattgaattcacccttgatagtcagattcagatgttgtacaccttgcatccggaaatattcttgtaaaataataggaagggaatttgttatattttcataattcactttcacttgttgcccctgcatggtaatgctaaaaaggagtaatacacctaatagaaatcttgttttcattttcattatttactttgaactataatttttatttttcctattactttctgttcgtcacgttcccggcaaagtgcccggtgtgtgctttctccttatacatctgaagagctttgatttcgttatgcaatcagtcgttttcttcttaaagtaactgaagggttttgcctgttctgttgccacgctttctgctttgccttttgcttctgtagccggaagctattttgctgtctgttcctggacttcctataatagttgacgaatggcttctgttctctcatcgcttgctcttcagattaaattctgtgcattcaaagtattccaaggcgaacgaaacgaagtcattacaaaatatgccgtttacctagcaatatatttcaagttgctggaaagtatctccatctattgaaataattatctttcccggcttcttctttggttgaatgtcttttttcattgtcatatcgtatattttctgaacagaatatgctttatacttcctaaatatgctgcaaatatagcaaaacacattttctcacttttatttttagtgtattttttttattgccaaatatatattcacttaccgatgaacaaagaatttacatccacttctgcgtcttccatcccaagcaccctctcgatatctttcagtattctggtataattgtcagatatttccttctccgtcctgaacgcgactaccggcagcggttcctccttcagttcgaagagcctgaacttcttcctgaaatgccctttgatattggaacggtttcccattccgataaattcccccggttccaatgaagcgaagtccttcgattcatatatctcttccttctgtgtgctgatggtcacgctggaattacggccgccaccgctgctgccggaactggtggacttcttctccttctcgtatttcccgaaaaagagagggtaatatttcaatgcctccacatcctgtgtgcagcctaggaagatatttccgaaattcgcctcaatggacgacctgtccagtttgctgtacagtttctccagcttgccttcggactgggtgagcagcaggaacgccgccccgtactcgcgcaggacggaaggcagcttctcgaagtcacgcaccttgaaggtggtcatctcgtccaggataaatacaaaggggaccctgttctccatggaaaacgagcgcgatgcgatactcattaccatggcgctgatatcgttcagcttcaggaattcctgaagctgtcccgtatcggccttcatcacgaagtgacgatatgcggcagcgtgcaacattccgggaactcatcccaaagcctgtacgccacgccgttcaggatgccaagcgcgcccgtataccattcgtcctgtttggatgtgggcggcatcaacgcgcccagtacgtcctccatcagctgcatgagcatcgtcctgtcctttatattcctcctgtccagcggattgaagcggtaagtccggttcatgtccgtgaaatttacataatagaactcatgggggtatccgtgtttcctgatcaggttgtatgcagtccgggtatagtcaaaatccttgaagtcatagatgaaaccggcgaatccggacctgatgtactgttccatcagcggtttgcctatggatttggtcttgccggaaccggctcctccatagacaaggaaattggagaaccagtaataatatctgataattgtcccgtccgtggcgtgaagggagagcagggcttttccaccctttccgctttctgtccctcctttaaaagaaagacgaagaagtacggaaacgacacccggaagcaggaaccaccacccatccggaatggtggcatgtgcgacagctgtttctgcaagtaccaacagcaggaacaggacatgtgacatccgggattttcccggaaacagacagctggcaatgccgccgccaaaaagcagggctgccagtctcataataaacatatgatccatattcataaattgatttagatttttccagttcagactgggagccgtcattatagagcaggtatatcatcttggtgtttatgcccacaaccacccagaggtattccttgcggaatccttttcccttgctgttcttttccgggacgagtattttgtaataggtttcgtcggctgccttataaggatcactcaaagctgtctgccggatacacttataaagattttcaaagaggcttgaggctttttccatcaacttatgagccgtaggtttcttcagcgtaaagccatgactttcgaagtagttgatgattctttcaactggtagcgattatatataacgtaattccatcagcctggcaatgaatgagccgtcatagctggaattcaagaaagccgagaccggtgtttttccctcaaagagacgaccgtcttgcgcataggtgtgtatcttgtagacgtgcttgatgaagcgcatgggtacacattcatagcggacacatattctggtagcgatggtaaccagccgggcgttattgatgtcaaaatcaggatcgtcgggataaacgtcatgttcctcctgctccatctcataatgtatgccacgtttggccccattgttctttctggctttacgcttatctgcttctctcttctgccgctcttcctccggcaatgcaggttgagggggggggctgttcggatgtgtttgatacaagtttggcgctccctttagtaagacgctgttgcttgctaagagattcgccttttttgaaggagtgcctctttaagggaagaaacctcctttatcaaatcatctatctggtccaggagtctgttgttatcatcccgcaactccttgattcgctccttcaataactctatgacctcatcctttttcatggcataaaagtacaaaaaatcaatgagtcggccaaaataatcggatggtaatttgaaatcaaatagctaatgtacagtgtattacattaaatcctaaaacgttttcgcaaccgtacagacttcaatgacactccatttaagataaaagacaaaacctgataagagatctcataattgcctgtatgggggttaaatgtcggcaactcaaaacttccaccttccagacgcttgtagtacaggagaaagccatcaccatcccaacgcagtatttttacactctgccggtttttgccaaagaataaaaatacatctccggaaatgggggacaactccttcatttgagagcgtatgattttgaataaaccgtcaatgccaaggttcatacgaacaaagcccaggtacagatagtagcgattggctgatgttagagaatacatggatctccctcctttctttcgtaatcgcgtaacatttttataacaccaccgggtgtggtccgtttgaccgaaatggtggttccactgttaaaggtgattgtgatcccggaaagactaaactcttcttccgacaacatggcgggggctatttgagtgaacgaaggagagaaagttgtcggtcgggagggttcaacgccgccataataatcacagaccgcatctgccttgacttgtttaacgctatagccccgtctggacatccaggaactcatacctccaaaagtggtatgctgatcgcggcaaacatcggctaaagaacaattgtagtctactttcaaacttcaaggaaatgtttccaagtttttccaaatcgattttctgctaaatccataatgattcatttttatatatggcaaaaatataagaatgaaaaatgggcggcaagatagaatcgcggaaacgcttactccaatttcgtattttttatatgtatgtatttgtttatcagtggctatagtatttgatattttagaaactaaaagattgagggtatctgtataaagcaataattatctatgatttagatagattttatagtgaaaagttccccaattacatagaggggcgtaaatttgtcccccgtatgtggcttgggggacaaaaatattgaaaaaataggcataacaaaagaaaatatctttcctaaaactattattttgccatatttaagtcgtttttagtcagcattttagattttttataattgtaactatatgataactatatagttaggttacttcccgatgcagtaattgcaagtttctgagtatcaaatgtttggagctctaaaaggtacagaagtctaatttcttgtcatttttagtcattgtaactcattgattatcaacaagttgcacactgccacattctttttgtaagacaaagataattgtattttgttgaatttcaaagttttccagcaaataagttacaagaacgaggtattttttacccttttttagtgatatggcatttttatcaatggcgtgcaatattatgcaaatagaaaacgtattttcgggttgtatataaatctttgttaagtgagataatacgaagactgatgttagcttgtatcgattttttatattaatgggtggactgatgttctgatttaatgattatattgactacgggtgcaataaattcgataaaagagtattagtttttgatttttgcataaatgatgtaaatattgaaatctaatttgcaaatatagatatttagttatatatttgtagaaaaacaattatatgatagcagaaattagatttaagaatatgttctcattcagagacgaggctatattaagttttgaagctgatagaagtaaggatatggagtcatatcatgttgtcgaattggggggtgatgtgagactattgaaagtggctgtcatttatggagcaaatgcttcgggtaaaagtaatattattaaagtttgtgattttatcaagtcattcattacttataccccacttaataaggcagaacaaattcaaatagtcccgtttctcctgaataaaacaagttcgaggcagttatctgaatattcgatttcgttctacttgaagaatgaggaaaaagcagttcgttatgtctattctgtagctttagacagatggcacgtagcaaaggaaagtctaatctattatccaagtcaacagcctgctactatatttgaaagaaatactgagaataacgtatcggttattaaatttggacagaagatcaaaatgtcgcaatctgtcaaagaggaaataacattgaagtgtttgcataacatgtcagtttttgctgcttatatgcaggtaaatacacatattgtagaattagaggcagttcttcagtatctaaccaatcaggttatgccggcaattgtgcctgcatcatctttaagtcgttatgccgaagaatcaatcaagaatgagtctgcaaaagattatattttgagatatctacaggaagctgatttcaatatttcaaatattacttccaaagaacaggaaacacataagggttcgatcaattatactatgtatcagcataaagtttcatctgatgatggtaacaatgattattatgagttcccggaactgtttgaatcggacggtactatccgtacgtttggcttggccgctcaagtgcaaaagattcttgaaagagatgcttttcttgcagttgacgagattgaatcctctcttcatccgaaattgatagaatacatcattgaacgttttctaaaagaatcagagcaagcccagttgttgctcactacacattatgatggactattaggagaagaagatttgcttaggaaagataatgtttggtttactgaaaagaatccggacggatcaagtgtgctgtatcctctaacagatttcaaaggattgaataggattagttctctccaaaaggcatataaatttggtaaattcggtgcagttcctaatctataatcatgtacttttatgagaaaagcaagaaaaaatacagcgaccagacaggttattcatatcgttggtgagggcttgactgaattattctatttcagtcatttgaaaaaaatacttggttatagatattctatttctcctcgtttatttgaaaacaatagtattgaaaaaatagataagaagataaaggaacttctagatgaagatgtctttgtaatatgtgtttttgatgcagatgttagcaggcgttctgatgcggaaaataaaaaaatggtgtcgctcaaaaagaaatatgaaaataatcccaatgtgattctctgtgatagcttacagtcaatagaatattggtttttactacattttgaagatacgtgtcgacattttcaagattcagcagctacagaaagagcattaaagcaatatctgccaacatacgataaaactcgaaaataccttgagaaggataaatgggttaaagaaatgcttgctgattcaaaaatggatagagcatgtgaactagccgaaaaatataaaggtagagattcttatagtgagatttataaggcgattaaaaaagttagtgaataaaatgaaagaagttggaagggagcaaagataggtaaaatgaggattctactaaccattatgacaaaattaggatgaagtttaattttgaaataggccatgatggaaaaatatatccgttgggatatcattcgaagtttcttaatgtcagattgcagaaaagactttctgaacttgggtggaagccatttatgcctaatagtaaaattcagtcgaattgttgtactcaattcttttttggcgataaccatgactatatacttcagatgtttttctgtaggcagattgtaaacctagaaaagaatgctagttcaagaggagataaaaggatatagtttttgaattaataatgaactatacacaattttatttgtcatacatgtactttattgtattattatttattagattgaattttttttcattattttgcctagttgtaaacacataaagatatggctaataaaaaaattaatagaatcaaggtaatgcttgctgaaaaagggagaactaacaaatggcttgcagtacaagtaggaaaagatcctgcaaccatctctaaatggtgtactaatgcagcacaacccagtttagaaatgttgctgcaagtagccaaagtattagaggttgaagtcaaagatttgattcgtgaacaagatgaataacaacagatataatttgctaaaacaaaaacttatatagtttttcgggaactatgcagaatgtctgcattctttgttcacacctttgcaattgttaactgattgttgtacttaaaatagattcagaaatgatgaatgtgaaagaagctattcgtaataatttgatggttgaattggataaatgtctcagttctctaattcgatatgatgtagattcattaatgcccttgttttatgttttatgcgcacatcatgagggtcatcttgtttcaattgtaggcgaaggaaagtcattgttccatggtaaaatgcacattcagccaatcgaaattgtagatggatatgagtctcctcttttgaaagagataaggaattctgttaatccaagcttctttgaaggtcaatcagcggaagctgtgttccagttttattcaatgtgtaatgaatacataaatgaattctatcaggatataatagaacacattatttctgtttacacgtcaaatgctggaaaatattctggcgtaagtgttactactcaagaaatagcccaattaatgggttattttattactgattgtgctccaagaagagtatatgatccatgtgctggcctttgctcttttgctattctcccagagttgagcaaaatagagtttgtttgttctgaattgagcaatcgtacaaaagtaattgcagatattcgattgaatgcagctggcaagcaacttgaaattaatcaggaagattgtacttttaattggcgtggaaattcaaattgtgattgccttgcatcagaattgccatttggccttcgtctgaatgataggagtttggatgaacgtcgtcctttgttattagaggatttcgtaattggtaaattcatcgaatcagagagtctttcttcagcagttctattagtatcagcttcaacttgcattcgtggaaacaataaacatatcagaaagaccttgtgtgaaaaaaactatgtggatgctgttataaagttgccaagaggggttctttcatatacaggagttgattctgttattcttgtattgaaaaaacaccgatatacaaaagatatcaaattcgtatatgctgatgattgcattatttctgatggaagaaataaaaagttgaactatcaggctgttattgaaagattagaaaaaacagaaggcaatcaaattggagttgttagagtggaagaaacatattcgcatgatttttcgcttgatccagtgtattatctgcataatatgattgaggtgcaatccggtcaaacactggttaaattcagagacatgacaactcaaatacgtggagaaaggagatttgatgatgtgactggaagagttttactttcagagcatctttgtgcaagcattactgaattccacactagaagtattgatattaactcaatcgaattggtaaatccagaccgatatgttaaagtgagcaacaagtgtgtgatacttaatatgacggcagataagttctattacaagaatgataatgatccattgtttgtaagtccaaatttctcttgttttgaagttaatgaaaatatctgtttaccagagtatttgatacatgtcctattagataacaagcgaattagagaaacttattctcaagggattatcagtcgtgttaattacaatgagttgtatctccctatttacacgaatctaagaagtcaaagactgattgttgagagaatatatcgtcaggagcaaaatgagcttaaaaagaaacttgaaaagcttcaagttttgagtggcaaatcttctgatctaattcataacttaggcatcacattcacaaaaatgagtgcagctatagctgtgcttagaaaagaaaatgcgacttctactcaaattgattccccagtaaatgtattgaatgataacattcagtttgcattacgtcagattaattgtactggtacagactttagccacgtaaagccggagttagaaaaagttaatctgtacaaaacagtatctaattatattatggcttggaaaaactttgggtacaaatcttttgatgtggccccaattaaactgaacgtctctgaggataccatggtagaaattgataaagatctattttttaccatgcttgactgtatctttattaatgcccaccaacatggttttaataaaaggtataattctcataacaaggtaatcatagaccttcagggggtatatgctgataacaataaatatgttatgattggaatctcaaataatggaaatcctttgacagatggctatagtattaaagattttgtagaaagaggtaatgtgggtttaaactcatcccaagacggtcttggaggtaatcatgtcatggaaatagcacatcattttggtggaaagatatccattgttagtgaatcagagtggctttcattcaatgtattgctacctatttatttaacatctgatgatacaaaatttattgaatatggaggtgaatatatataatgtaatatgggcagatgatgaatgcgcaaccctaaagcaggatgaacttattcgcaaggtattcaatgaaaaacgcattgaagtacttgagtatgtccctacatccacagcattgcgaaatgctttagaaacctataaagatgaagttgatgctgtagttgtagatggaaactttagtaaagaggatgttgattatttagagtctgatgatataagtggattgatacacactgtatcttttttggaactctataatacgaaaagggatatacctttttttctatatacagcaagaaagattctattgcaggatatctgcaagaacagagagctagattattttacgacaaccaaacgtttgattcaaaaaggcgatatagaattgttggcagaaaagatagtttcaacagttgaccacattcattccattgaatttatggtcaagaagaaatataaagcattgctgaatatggccaaaagggtaaatgatgattgtagtgaaaatctatatcaatttttattgaatgaagcacgcgatgttgagtataataggagtatatccatgtttaatgatttacgaggtattctggagcaaattatggatttgtgtaaagacaataatattatccctatagaagtaagcacattaaatgcttttaaattttattggagccaatatggttataagaacaacaatttggtctataagccgaacgagtctatcatgcctaaagcaatatctcacaccatagggaatctgatagatgttacgcaagatggttcacacaaaagagttgatttaaatttacaaatttcagaatatgtaactgaagcccagtctcctttcatgtttaggtcttgcctttatcaagtaatggatgttgtaagatggtatagcgagttaataactaaattgactgaaggtcaaataaatggtcaaaacttgtataaaatcactagaataaattaattagtaagtaaaaagtaaatatatgaataagcagcaacttgcaaataaaatatgggcatcggcgaacaagatgcgttcgaagatcgatgccaacgaatacaaggattatatccttggtcttattttctataagtttctctgtgacaacgaggagcaatatcttcgtaaggatggatggactgacgaggatatgccttttcttgttgaagactatgaagatgctaatgcaaaggatactattgagtactgtaagaacaatatcggatactttatcgagtataagtatctgttcagtacatggttgaagcctgattctatgtttaatgtggcagacctgagtgctgcacttaacaattttgaccgtttggtaagtgcgaactatcgctctgtctatgaaaagatctttttgactttgcaagccggtcttagtaaacttggagagaatccagcttcgcaaactcgcgcactaaaagacctcataaaactcattaaggatattcctaccgatggcagtcaagactatgacgtgcttggctatgtttatgaatatttgattggtaacttcgccgccaatgcaggcaaaaaggctggtgagttctatacaccacacgaagtagctatacttatgtcggagattgtggcagaacaccataaggcaaaggaaactatcgagatttacgacccaacatctggttctggttcgttgcttatcactattggcaagtcggttggtaggcatatcgaggacaagaataaagttaagtactatgcacaggagctgaaagagaatacctataacctcactcgaatgaatcttgtgatgcgtggtatcaagccaaacaacatcaatgctcgctgtgcagactcgcttgatgaagattggcctgtacaggcaggcgatatgagcaagcctctttatgtagatgctgtggtcagcaatcctccatattctcagcattggaatcctactgatgcagaaatggactctcgtttcaaggattacggtgtggctccaaagagcaaggctgattatgcgtttctgctccatgaactccaccacatcaagcctgacggcattctcactatcgttctgcctcatggcgtactttttcgaggtgatccagaaaaagatgttgatggcgaggggaagattcgtaagaacctcatagagaagaacaacatcgacgctatcattggtttgcctgccaatatcttctttggcactggtattcctacactcattatggtgctgaagcagcatcgtgataatgatgatgtactaatcgttgatgcttcaaagggatttgtaaaggatggcaagcagaacaaactgcgtgcttgcgacattaagcgcattgccgataccgttcgtgatagaaagtcaatccccggtttctctcgtgcagtatctcgtgacgaaatccgtcagaatggttacaaccttaacatcccccgttatgtagattcaagcgaaactgctgtgcagtatgacatctacgctactatgtttggaggcattccagagagtgagattgattcgctcgaaaactattggcaggcattaccatcattgcgtggcgaactattccaaagaaatgaagatgacagtccatacgcaagcgtgaaggtggagagcatagctgatgctatcaacgaaaatgcagacgtaaaagcattgaaacagtcgtttgttgatgcctttgcaggcttcgaggatatgcttcatgatcaccttatcaccaatgtcatgtctgtaaacgaaatgaaggagcaggatgccattgcagaagaaatcttccgccgcctacaatcaatcgcacttgttgataaatataccgcatatcaagcattggcagacaactggcagacaattgtcaatgacattgagacaatccaaaccgatggtatggaggcggttcgtgccgttgagcaggcttataagataaagaaggatggtgatgacgaagtcgaggttccagacggacttaaagggcgtattttgccattcgaattagtgcagagtgtgaaattccagtcagaacttgatgctattgctcagatgcaagcagaagtggacgaatgtgtctcaaatcttgaggatgcacctaacaatttcactgaagaggaaactacggtatatcttgaggatggcgacagtccaaagttgaacaagaagaagattacaagtgatgccaaaaccaagggagattctattgaacctgagacaaaggcaaaactcaaggagattgttgctctttgggacaagcaaagcaagacaaacaaggctatcaaggtggcaaaggctgatttagagtctaaaacaattgataccatacagaatttgacagatgtagaggtggacgaatttttgcatttgaagtgggttacacctatttatgatgcaataaagcaaactcttgaatccgaaatatatactttgagcaaatctttagtatatctctgtggcagatacgaaacaagttatagagacatcaattcccacatttctatcaatggcaatataatatcttcgatgattgaccaattaatgggttcagaatatgacattaagggtttgaaggaattacaatctttgttataatcacatatggaagaaatgacaaacataataccatcaatgagattcgatgagtttaagtattcttggaaggtaacaaccttaggtgaaataactcgtcaatatagggagtctaacaagaatgttcatcatcagaatcttttgtcattgagctatggcaagatagtgcgcaaggatatagaatctaaaaaaggacttttacctgcttcattcgatacttatcagataataaagaaagatattatcgtttttcgagtgaccgatcttcaaaatgacaagaaaagtcttcgagttggcatatccgaagaagaaggcatcattacacctgcttatgtctgtgtggagtgtgatactagagttgtagatccgcattatctctacacactgcttcactattatgatgatataaccaaagtctattataaaatgggtgatggtatgcgccagacattggcttattccgacctcaaagaattgaaggtgtatttgccaaattttcctgaacaacataaaattgttgagtgctttgaattgctagacaagcaaatccaaatatcatcaaaaaaaatagcatctctccgacaaatgaagactgcttctcttcatgcaatgttcccacaaaaaggtgagacaaggcctagagttagattcaaaggatttgaagatgaatattcttcaatgacagccaacgaattgttcaagaccttcgacgaaaggaaccatccagagcttcctgtactatcagcatgtcaggatattagaggaatggctcctcgaagtgaaagtggatatgatattttccatgataaatcaaacgaggtgacatacaagcgtgtgttgccaggtcagttcgtcatccatcttcgttcatttcaaggtggctttgcacactcgtccgttgaaggtatttgttctccggcatatacagtattcggtttcaaggaagatgacaaacacgatgactattattggaagtacatctttatgtctaaagctttcattgatcgcttgaaactgattacttatggtattcgagatggtcgttcaatcagttttaaggagtttatggaaatggactttgttttcccttcttatgaagagcagaaacagatctctattttcttccgtaccatcgacaaacaaatatctctcgaagaacagaaactagaatcactaaaacgcatcaaatcatcgtgtcttgataagatgtttgtttaatcaaaatattcaacatgggcaagactataacaacatacttgattgacggaacgccaaagggagtgcaaaccgtcgtgataagcaaccgcacaatgattgcttataatataccccgtacacgcatagacattttgcgagaagatgaacgtaaagaattgcgtacgccggctttgtatatactaataggtgaagaagagagcggaaatccgaaagcttatatcggtgagaccgaaaactttgataagagagtccgtgaccatatcaataagaaggatttctggcaaagagctttggtatttgtctcgcttgcccatgacaagacaaaggctgacgtgcagtatcttgaaaagagatctgtggagcttgcactgaaagtcaatcagtatacgctggatgagaacaagcagaatcccaaaaatcctactttgacagagtcgcaaagaagtaccgatgacgaatactttgaagacatccgcttcatcgtgtcgttcatgggttataacatcttcgagaaggctgaagtaacagacaagtcgcctatgttctacatcgtagagaatggaattcttgccaagggtatctataatgatggaggcatgacagtattggaaggaagcaagatatgtgtgaaagaaagtgctaagttcagacacccagaacagagagcaaaaatgctcaaagaatgccgttgtgaactggaagacgatttctacatcgtaaagcgtgctaagtcatttccatcaccaagtggagctgcagtattctgtctcggtcgttcttcgaacggttggtcagcttggataagcaatattgataagaagaaagctaaaacattaaatcaactctatagaaacaaagaatagctatgagtaacactcaatacacatcaaactctaacttctgcccaaaacctgttgcagagttaatcacgacaaagtatcactttgtcatcccttcctaccagcgtggttatcgttgggaggaaaaacaggttattgacctattggaagacatttgtgagtttgctaaacaggataaagaagatagttattacctgcagccactcgtcgtaaaaccttgcaagtggacagatactgatggcgtacagattgatgcctgggaagttttggatgggcagcaacgtttaaccacccttagattgatattgatgttcatatttgaatatggtttgatgcctttggaaaagaagatattcacacccgataagatttacaatctgacctatactaatcgccctcagttggattttgaaaaccccaaacctcaagacaacatagacagttactatctggctgttgccaagaatgtgattgagaaatggtttacgaatcacatctatgacggggtaatgaattcaatcaaagactgtttacttcttcctaataatagcaagcaagtaaagttcatttggtatgtggtttcagaagagaagcaagccattgaaagcatacaggtttttaacagacttaacaaaggaaaaatcagtcttacaagttcagaacttatcaaggcattgtttatcatggatagaaatatcctatctaataacgatcgggtcgaagctgacaaactggcattggattggaacatcatggagcgtcagtttcaggatgataagttctggtactttattagcaacaacaatgatagtcatcagacgagaatagatgtattgtttgactttgtaacagagaaaccaactgaccacgcggataaagattattcgtatcgtctattccagaacctatatgactattgcagagcgcaagaacgtaaagatgattctgtagaacttaaacaactatggaagaaacacggtattgacaacatgcgtgctgcttgggagtatgtcataaaaactaatgacaggttgattgcctggtacgaaaacaacttatactatcactatgttggttatctggtaagtgttggcaatcaacctcttgatatctataacaagctagaaaacgccaagcaacagttttctggaagagagtggacaaatgatgataccgagaaagagttccataaactaattatggatagtttcaaagacaaaggtaactatctcaacgcagccagcattgacggttttgaatacggctcaaagtatgtgttccgtctattgcttttgttcaatgtagagacaagccgccagaagggacagcgctttgcatttgactcattcaagaaagaaaaatgggacattgaacatattgactctcagaacaacgcatcattggttgaacacgaagaccgtttgcgctggttgaataatgtggcttatattcttggaatagaatcaaaactgaatgaaagaaaggcaacagcaaagccactttacaataaatgcatggattttattccaaagtatgaagctaatcttaggggaactggcattgacaaacaatacaccgacttctgtaaagaggtacttgaatacttttctgctggtgatggtgcaataaagaataaggatagcataggcaatctgacattgcttgattataagactaatagagagtatcaagatgcaccatttccatataagcgccactgcattatccgcgaagataaggccggaaaacgctttatgccaataggtacacgaaatgtattcttgaaatactattcgaactctaatacagaatcatccttcatagatgcaatgcgatggagtatgcctgactttgatggctatctaagggagatacacaacacggttgatgttatcttcaatgtgtttaactctaattctacagaaacttatgagcgataatatagataaaatgtgtttcgcagatcttattaagaaaggtaagatacgcataccacagatacaacgtgactatgcacagggacgtaagaacaaagaggtgaaggaaatccgcaaccattttgtacgtagccttttgcttgtagtaacaggtaagaaggctgaaacacaacttgactttgtgtatggtagtgatagaaaaaacgcttttgaacctctagatggtcagcagcgtttgactaccttgtttatcctgcattgggtgttaggcgtcgatttgcagacagccgaaggtgaatctatattgatatatgagactcgtaatacctcagaagcgttctgtaaagaattggttcaccataatgcaaagcaatttgtgaatgaagctgctgaaaagacaaaagagtcaaagaaaaaaactgatgaagagagaagtaaaccagaagagcagcgtgatgcctcaaaactgaaggcacatatctatacaccatctgaaattatccaaaatagagattggttccaatggggatggcgttttgatcctaccatcaactctatgcttgtaatgatagacactatctgtgagcagatggattggacgttggatttggatgcttgtcaggctagattaaacaatatcacctttaatcatcttgacttgggcgagatgggcatgtctgatgagttgttcattaagatgaatgcaagagggaagcttctttctgattttgacaagttgaaatctacacttgaggaagaaattcaattgcagcaaggagaagtaaattgtgatggtaagaaacttgctgattcatacatagaacatgcttggcgtgagaatatggatggaaagtggatagatttgttttggcagaagtatgcaagtgcagttatgacgcagattccttctgatgataataaaaaagaaagacttgccgctgcaaaggaaactgaaaaaagattgaagatatttctgttgcgtatgattgcaatgcagttgtttgcaaaagtacctagcatagatttgtcgaatgactttgagaaaccagatgatgatgacgaggaagcaatgcgtctatatgaaatcagaaagaatcgtatatataatttgcatgaaaccctgtttgagtcttcatataatgttaatgaatcagatctagatgatttgttaatcgcataccagaattatctcgttgactggagaagtagcgacagcaatatattgcctagttattgcacaatcattgatttcagagagctcataaatgatattaacttatggattattgataaaggtgaagggcaatatacggatgtaacaacattattgcctctggattcgttcttcgataacaatgactacacctatttctctcatttagttggcgataacattagtaatgatacccttgccacattgtattcattgcaatgcttcctgaagctctacccatataggtccgactcggaggcttggtgcttgaactttgaggaatggacacgtatgtctcgaaacgtatttaagttcgataacaatactgaccgtatcaataaacggaaggatgcttcggatgcatttggagctgtattcagtatggtttcggatatgaagcgctatcatgaagataatggtatagacctttatgaaaacaatgctgcagtattgttatttctcaaacaacttaatcacccatacaagggtattgacaataagtctttggaggaagaagaggataaggcaaaattgcgacttatcgacaacgaaggtattattaatgtttcctggacagatgcaataagaaatgctgaaagaaatccatatttatggggacaaatacgatgtctgttacattgggcaaatggtaacctggaaacatttattggttattctaattgcttgacaaagtggataaatcttgatagacaatgggaaaaacaagaactgtattataacgctatgttatgcttacagccggattgctggaaatcgaagaatcgactctatgagtttaatagagaccgagacaacagtatgaagcgttatttgcgagaggaaccagaatttggtgaatctgttcgtgtgttcataaaaacatggatagattggaatgatcaagcaacatttgaggacttctgcaaacacatagttgagtcaaccagcaacataggatgggtaaagtatttcaaacaacgtcctcatattatttgggaatctcgaagaaagagattctatgaagataaaggacatataatttttgctcaattacagtcaacagatagccattgtttagacccaatacttatatatatcaagacacttgctactgatgtattttataatgaagaagaaaaaaaattgatgaaagatgtaactgtagaattgcaagactcaaaatctcttggttctcatggtttgcttataagcatacctaaccacaactgcgagattcgttggggtgatggcataggtgactatgtcattacagaagatgacacaacatcaatagttaatgacattgatgtacttgtgtcaacaatgaaactaacgatagagcgatataaaacagaatactataatcatttatgataagcagaatttaaatatggctaacgataatactcaattcttcatcaaggaacttgcatttgagcaggctcttgccaatcttcttcacaccagtcatggatgggatggaggaatcatgatgaatccaacagaggaagaccttgtacagaactgggcgaatatcctctatgataataaccgcgacattaaccgattgggcaatgcacctttgacaaagacagagatgcagcaagtgattgaccaagtgaacatgtgtgcttcaccatttgagatgaaccgtcttatcaatggtggacaggttataataaagcgtgataatccagcagatgcaaataactgtggcaaggaggtatatttgaaaatctttgatgcacaggaaatatgtgctggtcagagccgttatcagattgtacgtcaacctcgtttcaaggcttctcatccattgggaggcgaacgtcgaggcgatataatgctacttatcaacggtatgcctgtaatccatgtggaattgaaacgtagcggagtggatgtgacacaagcagtcttccagattaagcgttacactcacgaaggtgttttttctagtggtatcttcaaattagtacaaattttcgtggccatgacacccgaaaagactttgtactttgctaatccaggagcagaagataacttcaaacctgagttccaattccattgggctgacttcaataatatggaaataactgattggcgtattattgctagtcaattattgtcaatccctatggcacatcagcttgtgggttactatactatagcagacgaaaaggacaagatgctaaaggtgctacgctcatatcagtattatgcagctagcaagataagcgatgtgactcaccgcacaaactgggatactcaccagcatcgtggtggttatatctggcacactacaggatcaggtaaaaccatgacttcatttaagagtgctcagctcatagcaaattctggtgatgcagacaaggtggtattcctgcttgaccgcatcgaactctcaatacagtctttggatgaataccgtggctttgctggcgatgatgatagcatacaggatactcagaatacagctatactagtcagcaagttgaggagtatcgatcctgatgaccgactgattgtaacatccatacaaaagatgtcgaacatcaatgtgcagaacggcatcgctcagagcgagatagatgcaatcggacgtaaacgattggtttttatcattgatgagtgccatcgtagtgtattcggaggtatgcttattggtatcaagaatgcttttccacgtgcgttgctctttggtttcacagggacaccagtctttgaagaaaatgcacataacgagataactacagaaacactctttggtgacatgttgcacaaatacacaatagcaagtggtattcctgatggcaacgtactgggatttgatgtgtatcgagtaaacacatacgaagatgatgaactgcgtgaaaaggcagcttttgcacaactcggggttcattccatcgaggaggtagatgaggatgaagaaaagaagaaggtgtataacaagtttatttctgaactacagatgccagatacatataatgatccaaagacaggaaagttgacacatggtatcgagcactatctgccaaaagatatttatcagcaacgagtgcatcaattagctgtagtacaggatattgtggcacatcgtgagcaggcaagcaagaatggcaagttccatgctatccttgccacacaaaacattccagaggctatcgcatattataaactattcaaggaactatacccatcggtaaatgccgtaactgtatttgacaataatatcgataacagtgatgaaggtattgctaaggaagatgctatactggagatgcttaccgactataacgctcgctatcaaacaacctttgcattggcaacttacggcaagtacaagaaggatgtagctaagcgtttggcacataagaagccttacttgggtatagaacatgatcatcaacaacagattgacctacttatcgttgtaacacagatgctgactggttatgactcaaaatgggtgaacactttgtatgtggacaaggtgatgaaatatgtggacataattcagtcgttttcacgtaccaatcgtttgtttggaccagacaaaccgtttggtatcatcaagtactatacttttccatacacaatggagcagaatatagaagatgctcttgaagtatatgtggacagacctcttggagtgtttgtggataaactggagcagaaccttgatagcatcaatcgttatttcctgcacataagtgatatctttaagtctcataacattcagaatttctcaaagttgcctgatactcgcgaagaccgcaatatgtttgccaaggactttgtgcagatgactcgtttgcttgaagctgcaaaattgcaaggcttcctttgggagaagactgagtatgagtttgagcatggtgatacctacacaaaggtaaaaatggagattgatgaatcaacatatcttaccctactacagcgttatcgcgaattgtttgagtcaaagccaggaggtaactctgagcctacagagtttgactatccaatcgatacctatatcacagaaacaggtacaggaactattgatgccgaatatatcaactcaaaatttgtgaagtttgtcaagaacctctatatgaatggtccaggtagtgaactgacaaaagaggctttgaaggaattgcacaagacgtttgcctcactctcacagcgtgaccagcgtacggcaatagtggttttgcatgacatagagagtggtgatcttcaccttgagacaggaaagaccattcaagattacattgcagagtaccagcttcgtgagctccacaagcagattatgatacttgcagaggctacaggcttaaacttcagtcagcttacccatatcatgggacgtgacgtgacagaacagaatatcaatgagtataaccagtttgagaaccttaaactgactcttgatggcgtgaagactcgcgctttcctcgaaaagatagaaggtacaacaattccacctcgtatggtacggccaaaggctgacaagatgcttcgcgatttcatccttgacggagcaaaacgagaagccatcctgaaggcttatcttggcgtaaacgttgatgttaaatcggaagctgaaacattaccagaagaagttgtgactgttacagcagggaaaaactccgaagtagagactggtttcaatttggaaactgtaagagataagatagaagagatattgacttcatgcatcccttcattgttgccccacatgcgttcaaagaaggaaattataaatagtgtattctatgtaatcaataccaagtcgattgactctcttgacggtgtggacattttcattcagagagcatttgagaatctatatgctaagaagtctacactagtggataagcatatcgcattcaatcagttagtgacaaagtttgaggcgtatcttaaaaagctttactaccttatcaatggtaaagaactttctgctcgtaatgaaggtgacactccttcatggaaggatgcgctctatgctcacaagtgcttgtggaacctgcgctggagcacagacgaagccaagcaacagctctataagtggttgttattggtgaagggctggcgcaacgaagagtctcatatttctccaacagcttcagagcaggaggtagataccgcactcaacataatccttaccatgtatttctacgtaacgggttcgtcaataactgccctagaagctaatggacacgatatttctggttctgatactcctgtagaagcaacaagtaaaattgtagattttactccttatcatatgaatgatgagactcaaattgcagcagaaccagaagatataagaaatctgccagaagaaacacggatagatattctcagaaagagtataatacaacttttaggttacacccctaaaaagtcgccgttcacaaagcaacgtcactggattgcaatttatcgtattgctgctgacatgggatttattattgatggcgattatgcttatttcaagtcaattattgacaatatggagattgagacactgaatgttcctctgacaactgcatatttagagaaaactgtcaaaggtttgtatgcaactaatattgaggattggaccaatgaagggctatcctcaaaagaactagcagaatatgaagaaattaagagttgtgcagatgctttttccaaggttgttgtgaagaatattcctaaaaaaaagagttctaattgattttatttgaaagagtgcagaaagactgcactctttctgcataattttgccatataaattaaaacaatgagcttatgccaacaaataaaaatgcacaattaagatatcaggtgcttgacaaatgtttgagcaattggtcaagacgttattacattgaagaccttgttgacgcatgtaatgaggctctttatctgtataatggcgaaactaaagatggaggtggggttaagaaacgtcaagttcaagaagatttgaagttcattgaaagtgaagaaggttatgcaatgttgattgatgctattcaggatggacaccgtaaatattaccgttatcacaaaaaaggtgcttctatcaaaaaacagcctataaatcaagaagaatttgacttgatacataacgccttgattctcctaaaacgctttgaaggtgtaccacagttcgaatggttagatgatttggagaaaaggctctacaccaccagcaaactaggtgaaactttagattcggttgtaagttttcagtataatccgtatctcaaaggtatggacacgtattataaaccaatttttgactctattgtaaataaaagggttatcgaaatagtgtatcatccatttggtaaagatgccagaactattgttataactccttactttctgaagcagtacaataacagatggtttctcataggaaagcataaagattcggaatacctatccaattttgcaatagacagaattgagggttttaaggaaacatctaaatcctacgagccacttgccgaggatatagatttcaaagagtattttagcgatgttgttggtgtctcactaagtaatgcacctgttgaagaggttattcttaaagtcagtaatcgagcttacggatatattgtgacaaaaccgttgcatgagtcccaatcaactgtctcaaccccaatggaagatggttactggcaagtcacactcaaagttcagaataattatgagcttcgttctctgcttcgttcttttggagagcagattgaagttatagcacctgaatctttgcgtaaaatgatgaaagattcagcagatgcaatgagccgtatgtataatgacaataaaagcgaagattaaatgtcaaaaacaaatataccccaaaaagtaatgcgattgttgtggctcagggctgcaggtcgatgtgagtttgaaggatgcaataaaatcctttatgaaggagatataacgaaggagtatgggaactttggagaactatgccatatcattggagattcgccaaatggtcctcgtggtggtgaaaaatcagaatcattggcacaggatataaataatataatattgttgtgtcctgcttgtcataaaataatagattcagaccctgagaaatatactatagagattgtggaagggatgaagaagcgtcatgaggacagaattcgtctcgtgactggtatagcgaacgacaaaaagagtcatgtagttacatactatagcaaaatcgggaaacatcttcccgacttctcgttcaatactatctcttcggtcttattcccagtatactacccagaggcaagttctgcaatagagattagtatgaagggaaatgtcatgaaggaatctgatccgaatttttgggagatagaggataacaacctgcaggctgcatttgcctacgaagtaaaacaacgtattcagtattcagaaacaaaacacatttcattatttccgtttgctgatatgccattgttagtaagacttgggacgttatttaatgacattcgcgaattgaaagtatatcagccacatcgtgacaccaagaaatgggaatggcaggagagtggtgatgagaacattgagtttagaattatcgaaccagcagaaaagagcaagcagcctgttcttgtgtttgcgctgagtgctacagctatcacggagagaattagaacattatattctagccaagatgtttcaatatggacagttacatgcactaatcctaacaatgattttttaaagacagaagcaaaacttaatgaatttgcaagtttcactagagaggtgcttgacaaaataaaagcatcatcagcctataatgagattttggttcacatggccatgcctgtagcgtgtgcgtttatgctcggtcacgtttggatgcccaaagctgacatgaaactaatactgcacgactattataataataccgaaaatagagcaattataattgaataagatatgagagaattaacaacagaagaacataaacaattcaacgaaatttttgagaatttaggtgcgtctttggatgtgcctgaatcaagatatgacgagctggtaagcagctatcaggctgtaggcaaattccttggagacgaatcttccccgctagctccatataagcctgagattcaaccacaaggttcgtttctactaggaacgatgattactccagtcaatgagaacgatgatcttgatattgacttagtgtgtgagttgatggaaaagcatcctgactggactgcggaaaacttaaaagcaaaagttggcgaaagactgaaggtttcagaacgatacaagaagttattggatgaagaggggcgtcgatgttggacacttttatatcgtaaaaattcagaaaacgcaagcgataaatatcacttggacatccttccatgtgtaaacaacgagaagacacgccttcgggagcaatatttcagtgtgtcagtagggcaggttgacaagcttgctctccgtattactgacagggaactctctaactataaatatgagacagatagtagtaaatggcttaagagcaatccgtttggttatgccaaatggtttgaggataggtgcagtgtattgactcgtagaacagttttgttttccgaagctaaagttggcaatgtgccagcatataaagagaagaaaagtcctttgcaacgtgttgtacagatacttaaacgtcaccgtgacttaatgtttaacggcgatgaaaacaagccaatctctattattatcacaacactagcagcacgtgcttacaacaaggaaacagacgttcttgatgcgttggtaaacgtagtcaacagtatggagagatatatcgaacgtgaaccaaataccggtctgtgtattgtgcgtaatcccgtaaatcctgatgagaactttgccgacaaatgggtagaaacaccgcagaaacagttaaacttctttgcatggttaaaacaagtaaagcaagatgtggagcaaatcattgaaaaaagaggtggtttgcaattaattgctgagtctatgaacaaacctttcggtagagatgtagtgcagcggacttttagtgcaattgccgacaatcaacgtaaaaacagagataataacgtattaagagctacgataacaggtgctttaggaactattggtacggttgtgaaagctcatacattccatggagacgaataaatgcaaagagaaaagaaatttacaaaaatacagcagaaggcttttttgcaacaagcatatcccaacggacacttctatgcagaaactccaacgagtttctgctggaagtattccgtgcaaccatcttctttaagtggaacttatcaattcaagatttgctacaaagaaggaaagcatgtggatgtgtttgctctagataagttatctctgtgtgaaggagaaaaaggattgccacatgtttataatactgataagcagcatctctgtatctaccatcgtccatcagaagaatggaatgcttcgcacaaaataacagaaattattccctggatttcagaatggttttactattatgaaaattggcttgttacagccaagtggcttggaggaggaatccacagaggaaagaaagagtgatattgtattttaagtatagtaataagaggcttctaatatccactctaattgaccaatcgaattaaaagtatttgtttgtccacaatatccttccatcatcccagttcgtttcaaatggttcaacttgttttcgcaaattttattgattaaggtaaagtaacaggaagcataaaagtatcttatgaaaaatagggattaagtaagtgtattttattatttaacttaataattgcagtagctatttttagtatgtttgcagtcatactaagagttttttctttgttatgactgcaaatattcttcccgttttatagtttaccacattctgtatggcattaaattctgtaccttgagtcgttataaagctattagtaaacctctcttaaaagctcagttcaaagtataataagtagtcgttatagaaatgtaaacttggtaatagctatgctttaaatggtttacactttcggtttacagcagaaaaatcaagatgtaaatttatatatctgattaacagatgtatacaaaatgtttttatcttctttatctgtttggcatgttattctcactattatgagtatatactcttgagtgcgcacgaaaagagtatcgatttattcacttataatattggaattatgtcatatatagataatgagatactcgaaagactgataggaaccatggtagagggatttactcgcattgaaaagaaactggaccagatgaaccgtctgaaagaatgtatgaacggagacagactgcttgataatgtggatttggcagaactccttggtgtgtcacaaagaactttggcacgttacaggcaagagggcaagattaaatattactcggtggaaaagaacgggaaatcattctatctcgcctcagagatacagagtttccttctccagcgaggtaagaacatagtaaataataagtagcaaatagaataagtgaccgtattctgatggaaagatgatacatacggtcacttatgcattataccgggattgcggtcactttcaatgtttccagatttacataggcaccgcgatatagtgtttttccttccttgaacattttccataatatgtcacatccgatatgtgccagtgtggagttaatgaacaaatcctgtttttccagggcttccgccagagaacagcttggtcccgattctttttctttgattttcgcatagtccacttcttcggtgatgacattcattttaggcatgggaatatattcctgtgaagaaggttggagaactttctcacgtaccgtcccgatgatgacttgtccttttgtctggctgttcccgaaatccatccagtatatgggagccgaatggtcactgaagttttctttgcggactttcttcaggaacttccaaagcgtaagacgtgaacgaatattatccgtacaggtaatgatgatatttgctgtgctgtcttcagaaaaattcctggtaggaaaacattgcggttcggtagtccatgcgtatccgaagaaacggttgatgcgtgtgacaagtgatacggccttgttcagtcccagttccgtctcactgaaaagctggcgtcctatattggcctggcttaccgtatcgggatcgaatacggtgacatgcagtccgggatggcccaatgcctgaagtgccatgctcatgcgtgccagattggttatcacttgtgagccggtacctccggctccgatgacaaataccgttaccggatgacgcggattgagcaggtagcggtcggtaaaatgtatctttttcatggaagtatgtctttaagttttttattcatgggcttgagttcgttcatgtcgaacggattgtttcttatgttctcggtgacgatgacaagatttgaaacggtaggattgacatttcctcccagatgggagaattcagtcagccagaaccgtttttcccagtattccagcagggaaaggaaagtcggattctgtggcttttccaaagaactgctgccaaggcagacacttgaaccggtcacgttgaagaacggggcacggaacagcggagtcgtctccaccggacgttttcccttgaaggcgaacacgtccatgcttccgttttttacatggtagacaatccccggcagattgaacatgccgtcctgtatattgagatccttgtgaaagaacatctgtctctttccgggcggattgtaccagatatattcctcctgtccttttttcggattgcaggccagcatgttttcagggactctgcctgccggtatcccactcatttcttccgtataggattccagcagggtattcatgaattcgtatgtgacggggatacctgcccccatctgtccgctttttccgatgggacgcaattctatgaagtacttggtatcagaatttcttctgtcttcatacttgtaggctatgatagccgccttcggcaccatcattttttgaatattttgggtcagttcattcatgatgtttataaattataggtaacatgttctacaaatttctcaaaccattttgagaaccgttccggataattctctggtctgaacagtttttcagtttccggtgtgatgaaggtaaatgatacgggcgtctgattatatgtttcctgacagtcagtactgaaacagctttccatgtctttggtaaccgtatccgtgatggaatatgtaagcagaatctgatattcgagcggtggcggttcgaaatccctttccttttcgcttgcataatcatagtcataattcaagatataagggctgtcctttgcaatcagggacatcccttcagtaatcagttccaaaagtcttttttccttattgctggaaggattgtagttgtggatatgttcttcaagattcctgcagaaagccctggagtgcatccggcacagcttcctatggattctccctttctcatatgacctgaagagcttttcctttctgtacaaatcctttttctcatcctcatcaagctgttcaaagtccacataatcgatacagacttccgacatctcaaaataaggggtatcggttatatccatcatcctgtgatacttgatgaaccgtctgatgaactccagtgtgatccttttgatttcacctttcagtctttccgtaaaatctatcggtatcaggaacagggtgtaatcaggccattcatggaaatgatagatacagaactggagcctgtcaccgacaagttccagattcacatgatgagatactatggaatccaatgcattatatagcaggcatattttttctcttatggaagtcctgcctacaggatggtatggcagctccacatccaggagctgcgcatactttatggctgaacggtacaggaaatcaagattctctttggtggtgacatttaccgttacatccctgtcattctcaacatacaaatcgggagcgatggaaggtattctcgtgttcagaaaaccatgaggctttctgcaggagggagtcttcttttctttctgttcctgatgccccggcttatgtccgtattttcgagttccgatatgataagtctggctaaatttttcaaagcccgttccgtaagttgtgtacatggtttcttgtctttacgttgttcttttttcatgttcttacccttttactccgatagtggtcttgaattcatatactgcccggtcgtcttcgatttccggtccgtgtacggtcgcggtggtcagttccggatagttcattgaatagaagtccatcacttcagtcggagacatgtttacgttcggatcgtccagtacggtttcctgactgttcttcctcattttgaagactcttttcattcctttaatttccagtgccatattgtttatagtttattggttttacaagtcatttatttttatatatcagcagtatatcatttctacctgtgcctcgtccttcattcggtactcagccggaaaatccggatattccgcatacgggtcttctcttagaagctccctgtcattttcgtcttccggatcgaagcagaatgtatcatgggctgccggtgtagtctggtattcccgtccgtttccgttctgtacttgtaccgttccgttcggtatatgaccgtttgtcggctgccgtacctgctgctgcggatatggctgcattgtagctccttgcggcatacctgttccttgcattacgggacggtttggagcaggttggatatatgctccgttcgttccatataccggttgaggcatttcctgtggaatctgttgtggagcaggctgcatgacaggttcaggattcatagtatgggtctgttgctccgggaatatgcttgtttgcataccgggctgtggctgaccgttcatgctgccttgtggttggggaattaccggcgccgattcctctgccataccgaacagacttccttcgctggcctgtttctgtacttcctgcatcttttcgtcaatctccttctgtttttctgaaggagccagcacccgtgcctgtttcagccatgtcattgcttcggagaacctttttgcggcagttgcttcatcagccttcttgaggagtttttccatcttttcccgtttttccctggcttcctttgattcggccggtattgttggagccttggatgatttggcctgtgatgtagccttttctgcctgtttctcgaaattttccgcattgacaagcagtccctgtaccttctgtatcggttggagtatggtctgcaggaagcccatatccaattctgccggtgttccgtttacgaccagtggcaccatgttttgccgcgtatcctctttcaggctgttccgccttggcatgactgccacactcaggttgttgtccactttacggatattgatattcagatccgtacctgctgtaatcatctgataaattgattgaaaaaacataattgaaaaattttatggttatacataagtttccttgaagaattctttcaggacattctctctgtcaggattgctggaaatatcacgcagagattccagataatagccgatgtttttaggctcatcaactgtattgggcagacgtcttttgactggtctgatatgttcactctgtggccatacagccggcatgacaggagcagaagatatacatgtacttgttttcatatctgttggttttattggttagaaaaacaggagtccgacaatgaaaaagataaatgctatccttacaatcagtagaagagctctgaaaagaaatcctatgattcctccggtgagcaggagcattgcaatcatacctgtaggcatgatacctttgtctgtcagcataagtattccgataaccagtaccagggttaccgcatgcttgctgatactttcgataatctgtagtttcataatccttaattttatgaatgaataatcccatcgggatgtgttttcccgattttataggcctccggcctcttggattgcctttttgcgcaaggcctggcaggaaaaaataccggagcgtagcgaggatgatttttttctgtccagccaagcccttgagggcagccttgcggcaaaaggcaggcaatccaagacctttgccgcttaaaagcggaaaaacagattcttttctgtacggatacaaaaaaatgcagaccttccggcctgcattcttatggttatattgatatggatgttattcttcttttgtggaataggtattgaaaatgtcatcagtcatttccttggcgagagtcctgatcctgttcaggaagtcctgtccggttatcattccgctttcaagtccggccagctgtttttcccagtctgcggtgagtgaagtatccgcaattttctttccacggatggtttcgtaggtgaacatgcctttcggggtcggaacgatatatttccctgaataacggatatacttacggttaaccagtgtacggatgatattggtacgtgaggataccgtgcccagtccgttcagctccatgtattccaccagttctgcatccgtgaacggatctaccggcagctcttttttgtgtaccatgttgcatccgcatacattcagagtatcacctttctccacttcggggagttctttgacggaatatcccgatgtcgggatcatgtcgtaacgcatgaacacgtcatgccagccggcttcaatgattcttgtttgttcggccttgaaatgctgtgcggcacaaaccgcttcaacatttgtcgtttctatgcggcatggagccatgaatgtttcaagcatccttccggctacaagtctgtaaacctgcatttccttttcggacagatttccgggacggatacctgtaatgatgatggcatgatgtacattggctttttctgcgcttattacgtggcgggacaaattggatatgtcaatacctccagttcctttagctgcagggaacagctcccatgatagcagacacgccatgattggtggaagcgagtcaaacacatcctccgtcagataacggctggaagtccgcggataggaaatcagtttcttttcataaagagactgggcgatgtcatacacctctgatgcggtaaaaccatagcggatgttcgcttccttctgaagctgtgtcaggtcaagcagatccggtggaagtatttcctttacgctgtgactgatacctgtgatctgtgcctgatgtgccagcttgcagtcctgaaaaaacattgttgcggattctttgtcgggaagatcctgtgtgcggcgcatcttgaagagaatgccgtccttttgcaggctgatgtagatgggccagctgtccgatgaaatatggttctccctttcacggtagcgtctgctgatggcagccagtaccggtgtctgcacccgtccgagggaattgttgccaaggccagtcgccttgcacatggcatagctggcgttgattccgagaatccagtccgccttgttgcggctgtcggcagaaaggaacaggctgtcgtagcaactgtccggcttcaggttttccatgcctttacgcacagactcgtcggtaagagaggaaatccacagacggaagcaaggctgtgtacagttcaggtattgatagacatagcggaatgtcatttccccgtcacggctggcatcggtagccgcaatgatggtatcgcatgcctgaaacactctctcgattactttaaactggagcacggcatcaatgtccggtatccatccgttctcggtgcgtgtatgccgtaccatcagttcaaattcggacgggatgaaaggaaagtcattccgttccagcttctgggttccgtagtccttcggcatggccagtgacagcatgttcccgaaagtccatgtaaccatgtagccgtttccttccacatatccgtttcttactttggttgcaccgatgattcttccgatttcttttcctacacttggtttgtctgttaatatggcaatcatgataaattctgtttttatatctttccatacggacttaccgtatggaaagagagatgatacattatggattcttatttattcacctgaagggttgataccgtttacgctgatgaccggatttccattctcgtcttcaatcagactgagtgtggcgtccatggtcagtgaaaatacaggagtcttgatttttatggacatgacattggtttcctctccctgaaggagcaggtccatgtttccgtccttttcaatttgcgatctgctgatacctatcgattccagtttctcccaatcgatttgttcagccttgtagatatgatgattgttcttgttcatgttctttccttttttagtagttgatgatttgaatgatttgaatcccgttctggtcagacagcttgttttgcaccttttttctgctcctgttgctgggtattgtcagtctgtgaggcacgctgtgaggtattgcggcgtacatccggattttcctggaaatattgcagctgtccggtgtttgcgtttactttcaggtaggaatcgaacggtttgccgtttgggcctttcatacctgttacgaggatagcctttccgtcctgaagatttgctctttcctgtgccgagagcaggtgtccgtaaacctcagccgggatggtaggtgcctggcgttcgttgaaaccgtccggagttctggaatactgtggtcttccgcttgccaggtccagcttgacgaatgacgagaattcctcacctttacggttgatcatgttctcaagatagatgggctgtcctttgcgtaacgcttccttgtcttccggtgtgagttgtaccgaacagatttccttcggtatgtagatttctcccgtttccggattgtggcgtgtatattggagaccgcctgttaccttatccatggtaacgaaggaggaaaacagttcgccgttttttcgtttcatatcctctacaaggatggtgtggccttcgtttaacgctttgagctgcatgggggaaagcggtacaccgccaagcgtctgctggttgaaagcctggtctttcgggaaaataaattcgatgcctcttctttccgcattgtattgctgtagatactaattgaaaagtgcgctgtattctaattgaaaagagctccatccataacttgttacaaaattactataagtttaaaatattcatttatcttgtctcattttttgtgtttccttaagcctataagacagtccggtcatattaaccagataagctttatgtgtaagcctgtcaaccattgccgccacaagcaccttgtcctttatgatttcattccatctgttaaaagccaaattagtagtaatgattgtagccttttttccggctcttaacgacaggtggttaaaaagcagttctcctccttccttgtcacaactgacatatccgaactcatcacagatgaccagatcgtatttttcaaaccttaattgtagcgtcctcagtgtctttgctgatttagcctcccttatctgggtaagcaggaccggcactgaagtaaacaatacggtaaagtcctgttggcaggcctttattcctaaagccgtagcaatatgcgtctttcccgttcccggatttccatacaggaccaggtttcttccctgtctgatgaagtccagtgtctccaattcaggtaatattacctgtgcctctttgggcatgtcttccataacaagctcatgcagatacttcatttgtggaaatcccgcagatcttatccttgatcttcttctacactcccttctcctggcgctttcctttccaagcaattccgtcaagaactgcagatggttccagttttcttcagctgccaatgaaagggtgcattccagttcctctttaaaggccagaagcttcagttctgcagcatagtcataaatggtttctttttctgatttcatatattataaacttaaatggttggtattatatcatgcacttcattgtatcctgtcatgagcgccgtgatgccttcaagcatatccacagcttctctttctatattctcctgttgtgccgggagaacaggcggttccatggtttcttctgtctctccctgtacgctaccatgcagcatggcctttacctggtccggagatatctttctgacaccacgtccggtcagctccttgcatgccgtgacaatgtccgttccggaaaatccattttttcgggcatagtccagcaacagaacaaacgtcctgttgtcctccttgaaatggatgtcatacagccttctcagttcttccggtgctctttgccaaaccacagagtggggcaatgcccccggtttacgggaaagtgtacgcaaatagtgctccagcttgatgcaccagtctccaccgcaataactgcgttgatgagaggccactttctccttcccgtacaggatgacgattttttcactataaaccttgacatgtactttttctcccacaagagaatcaggtacggaataatgaacatttttcatgctgatagttgaccatttatccacaatgtactcatagacctcaaaacagcccagattaccgggaaaaggcttcagcgatgacaggtcagcttccagacgtgatgttttctccgctgttgaaagactgccttgctcgttgttgacctgcatacatacccggtttaaatgctcctgggcagaatgtatatcaccaaaatggtctgtcaggcagaaagctttccttctgacatattccacgctgcgctccacatgtcctttctcccatccggcccgtacattacagaaacggtactcaaaacaatagaaaccggacatcttcatcaaagcttctgtaggtttcttatcaccaccgacaaagctcttgacggctacacgcatattgtcatagaccatcatggcggggacaccatgtatatccctgaaaaagttacggtgggattccatgaaggcaagcgtattctgatgcctgaaaagataggcgtatctgccattgctatgcccgaaagtgaatacggccagataaaacttggttttgacgccgtcaataaaaagaagaacttcaccccagtcaaactcggcaatgcatccaggctcatagaacaaccggataaaggcttcgctctttttcttctctttgtatgactctatattttttatataactgcatactgtggcgtaactgatggtgtatccttgagataacagaaactggtggatatcctttttcaacatgcgctgtttgcgaagtccggtagctatcttaacggcattcttcttcaggcaaaatcctatcttatccttaatctcttgtgtgagccggcgaggacggcgtctggaactgtcatacctgggctggatggtaagcaaatcactcaaagcctcttctggattgtccgtgcggatggctgattcgtactttgaaagaatattgtcaacggtatgacggctgacatgaagttcacgagagatacgccgtttgctataaccgcatactctatacatgtgtattattgattgtctttctaccatagtcttcattttacctttgcatttggattatacaaaggtcattatacttatcctatggtggcgcaattttcaactggaatattggcgcacttttcaattagtatctacacatttcctatgtacaacacatcattaaatatataaaaagtattatctttgcatattatatgataggttgactatggcaaagtcatcgacatagtcgctttgcaccttaaataagaaaatatggcaaagaatacaatgggaaccaagcttccccgaaaattggagcagaagatgcagattgtaggtgagcagattaagttggctcgcttgcgtcggaatctgagtgtggctcaggttgctgaacgtgccacctgttcaccgcttactgtgtcccgaatagaaaaagggattcctacagttgcaatagggatctatctacgtgttttgtacgcattgcaacttgacgatgacattctattgcttgccaaagaagataaaatgggaaaagctttgcaggatttgagtttgaaaacaagagaacgtgcatctaaaaaggaataaggatgaaaaggctatatgtatatgccgatttcgattggctcaaagaagtggaactcattggcgaactaggctatgagtctcttcgtggtgcggacagttatagttttacgttcaataatgaatggttaaggcagcacagcgatctgtttttgagtgacgacctgaataattacccaggacaacaatacacacaaccggacaaggatatattcggatgtttttctgatgctttgccggatcgttggggacgtactttgttgttgcgtcgtgagcaattagtggcagcggaagaaaagcgatcagtacggagattgtcatccttcgatttcttgactggtatcgatgatttctcccgaatgggtggattccgttttaaggaagacctcgatggcgaatttatcaatgtgagtgaatcgttgaaaattccacctttgacggatattcgggaactgattgcagccagtgccgagatagagaaatgtgaagaaaacaatatgctccctgataggaaatggattgcacaacttgtgcaaccgggaacgtcattaggaggtgcaaggcctaaagccaatgttgtagatacagataaagttctttatgtggccaagtttccatcgcgcaaggatgactatgatgttggactttgggagcatttcagtcatttgcttgccacaaaagcagggataaacgctgcaaaaacaaaagtgttggcaactggagagaaatatcatacattgctgtcacaacgcttcgatagaacccaagaaggaaaacgcattcattttgcatctgccatgaccttgttgggattaagtgatggagataatgcaactactggacacggctatttggatatagttgacttcattattcagaactgtaccgatgtagagcgaaacctgcaggaactatatcgtcgtgtggctttcaatatttgtatcggcaatactgatgaccatttccgcaatcatggttttcttttgaccgcaaaaggttggacattgtctcctgcttacgatatgaatccaacgctgcatgaatatcaaagtctgctcatctccgctgattccaataaggcggatttgagcattttgctcgatacttgcgaggattatatgctcaataagaaaacagcagagaagattgttgcagaggtagttgaagtcgtaaaagaatggcgggaacttgctaatcgtcaaggcatatccaaaagagaaatggatatgttttcaggagtgctggatgaaagatgcaagcaatatgttagtatttaacatcttagttcaatcagaataaggaggaaataatcatgagtggaggatattttaataggaacacatacgcaatgcgtgagatagctgatgctattgagcgtgacattgcaagggctttacaaccaaagccggagaaagtacaagaggattattggactatttacgagaaagattgctttggctcatatcatagttataaggactacatgagttttgggaactatgaagacgcagaatcttttcttctgagagataaaaccatcgtcaaggcagaacaaaaatacgcagaccgacgattctttgatgatggggtgattttccaatcaacaaaacgatatatgtctgacactccagatgctgaacaaattccggtattatactcaatccatcattgttattatgatcattatctctatgaagcagatgtattggaactgttagatgagacgatagatgcaatgaaggaggcgtatcggcaaattcgtatagcagaaatatatgcggaacgagtaggctggatgatgagtggcgatgatagcgaagagtgtttccgtgaacgcatcaaggaagacttgacggagtttgaaaaggaatatgcgtcaaaagactggacttatctcgatgaagatgacgaataaaagcaataacctatcataaagtaaagaaagaggtgtgttcttgcatattatatgatagattgatgatgcgaccgatacaatggaatcaaattatgtggaatcaacattatgtttatgcagcataatgctttttgtaacgacgttatatgatatttttatcatgttgttttgaatattatctttttatgtttaactttgtacttgaaatataatacgaagcaatatggcgaaaatagaatgctcaaaccgattgcgtgtagttctagcggaaaaggaaataaccaatcgttggctggcagaacagatgggcgtcaccgatatgacagtgtcacgatggaagactaataagatacaaccatcaatggctcagtttgtagaaatagcccaactgcttaaagtggatattaaagaccttatagaggccgattttaattatgaagtagaatgagtagacaaaaaaaatatacatttatagatttattcgcagggtgtggtgggttgagccttgggcttgaacaggcagggtttgaagttgtgttcatgaacgagattgttgaaacctttgcatctacttacttggctaatcatagtctaaaacaaggacagtattttattggagacatcaatgaattgaatacttgtttagacaaatatagagatacacttaagaatccggatagaccaattactttagtatgtggaggccctccttgccaaggcttttcgatggcgaataggcaaaggattattgatgatccaagaaatcagctttataaggcttatttgcaattcctttcggaaattagaccgcaatttttcataatggaaaatgtaaaaggaatggctaataagttcgatgagataattgccaatttcaaagagtacttaggagatgagtacctttatgattatcggttattgaaagttcaagattttggtatacctcaaaatagagaacgtttcataatgattggtaacagaatgggtgttgctccaaatgatatttttgcagaaattgaacgttacaaaagagatccttttttattaagagatgtattgtttgggctgccacatttggaagctagaaaagcaaagaatcaaggagagtatgaatctgaagagtgtggatttacggaacgagatttttcatatccggatacagatttttatcactttattaatggtgatagaatcattactaaattatataatcacaaaaatagatataataatttacgtgatattgagatttatagaagattgcctcagggagcaaattctttacatgaatccatacaagatataatgccgtataaaaggcgtaataacatatttaaagataagtactttaaacttgatgagaaccaaatatgtaaaactatcacttctcatatgaagtatgattgtaatatgtatattcatccatgggaagcgcgtggattatctccaagggaggctgcacgcatacaaacatttccagatgattttatattgaaaggagctcaaaactcatggtatgcacaagttggaaatgcagtaccagtgaagtttgctgaagtgataggacgtagtataatgaaattcttatgaaacatttagaactatttgctggtattggtggttttaggagggcaatggatcttcttacgaaggacaatgtcatggagtttcattgtgtcgggtattcagagattgatattaaggcggaattgacctatcgtgcaaattataacatagatgaaaatgaatttgtactgggggatattgttgcttttaccggtaataaaaagaacataaaatctcttcctaaattcgacttactaacaggtggatttccctgtcagacattcagtatgatgggaagccaagctggatttgaagaggatcgcggacagatgtttttccgtattatggatatattggcgataaagaagcccaaatatgtcttattggagaatgtcaagaatcttcgaaatcatgataaaggaaggacatttaatagaatcaaacatgaattagaatcaataggttatcgtgtttatgccgatattttcaatacatcagatttccatttgccacaaacacgtaatagagtgttgatttttgctacaactgcaaaaatttctaacgattttgacttctcgtctaagttgattgcgaaagagtttgataaaatgtataaagaaacgagtttggagtattttgagacgatatctgatgtattaatgcaggatgtggattctaagtactatctttctgaacgcataaaaccaacattgctttcagatggttcttctaactttaaatccaagtctgatataaatatgaagatagctcgtcctttaacggcgactatgcataaaatgcatagagcgtgtcaggataattattatagccaagattatatagagtcacatggtaagataaatcctgttgacacaatgacaaaggaggaactggctaaacttccaattcgcaaacttactccagaagaagcctttatgctgcaggggtttcctgctgagttcgctcgaaaaggtagcgcatacggtgttgctgatggctctctttataaacaagctggcaatgctgtaagcgtcaatacaatatatgcggtattgtattatctcattaaatgtaaaataattaaatgacaataatatggaagaaattgctaaacacataaacgatactaacgctagttatcgtcatatcggagcaggagatgctaaaaataccgatttgtttttagataatgagcattacgaattgttccaagattgcggagaacagataaccgtaagatttgataagacaaatcttacacaggcgatattgtttattgcgtctattcttccacgaaaatttgaccaatctgctaatcattatattgtaaattattcagatggatttgtgtttgatcaattagcaatacttgatgctttatttaaagaaaatggtgtttcagtaaatacatttacccaaaaatggaatgccagaaaagatgtactaaaaaagaatggagaaatagacaatcgtttttacttcaacaatctactcaaggaagttaagtataaggatcatactggtgctattcaaataactaagttcactataaggaactattttgctggaggctattcaaatctaaatataaagaaggcgtcagatggaatatttgatgtaagaatagataatgtgacagagccatacaatgatggtaaagaggatggattagaggatgttgcctcacttcaaacagagtcttatgataaaattagtcgtcaaataatttattatggtgctcctggaacagggaaatcgcataaaattaaggaaatacttggagaatacgaagggtgtcctgcggataaaaaagttcccaaagcaaatatttttagaactacttttcatccggacagtgattattcaacttttgtcggggcatacaagccgacaatggaaaagccaattgataaaatatatgccaagggagagctcattagcaaattaaccgaaatgaaagagggaggtgtcacgtattcatcccaaaaatttggagcgaaatattggcgttcattaaaacagttgaatctttctgacaagaaggatatactccaagcttgcggtatgtctgataattacactgttgaatttgataaaggaatggctgttggagaagaatatcttgcttgttcaaacgaatctcgtataatttattctttcgttcctcaggcatttcttaatgcttatatacaggcatacaaaaaatcggaagaaaaagtatatcttattattgaggaaatcaatcgaggcaattgcgcacaaatattcggagatttgttccagcttcttgatagagatgttaatggcaaatcggagtatggcattaaggctgatgcagatttgagggcttttctagaagagaagcttggcgaggataatcaaggaataaaagacggagaactttgtctgccgtcaaatctgtatatctatgcaaccatgaatacttcagaccaatcgttgttcccgatagatagcgcattcaagagacgttgggattgggagtatgagccgattaagtataagaatacaggctggaagatagttattgacggtacagtatattcttgggtttcattccaaagaatagtcaacgaaaagattttgagggcaaatagctccgaagataagatgttaggtgattatttcgtaaatccgtcagatggaataattaccgataaagtcttgttgaacaaaatattgttctatctatggaatgatgtctgcaaagatggtgaaggggatatattcaaagtcggtgagactgaagatatttccttctctgaattgtatggagaaaatgggactaaaacattaaagaaaatgatgtcctatctcggagtcacagaccctaacggcaataaggttactattgaaaatgacgcggagaatacagaactctaatttgaataaattttatgctgctgtttattgaaggatacccatatagtctgaacgatattgtcaaggatggtttgacagtcagagatgtactcaaagatgttgtgtcagttcctgtaaaggaggacaaatattctttcgggtatgtcgggtattgttatagcaagacagcaaaagatgttgtattcttcttgcccaaagtagtattgacaggtgagataaacgaggagagtggggatgatacgatattcggtgcttcgccacaggaaataatagactttgagtccgaaaaggtaaagactaagtttacggaagaaggttgcaaagaatacaaggaattcctgtccacactttcgatttggatataccggacgataagcgtatataaacaatctcacaacgacaatatacttgaaagcaaggaatatcagtccgaaagcagaggacgaaaacagaaacacaacacattacttgatgtgataatagcactgagggatttcaacagaagcaatcaggactattttaccttcgtggccaggaacgttcattccggttataacaaaatcaactggaacaggaccattacttcatcgcaggccatcatacaaagcggaagtcctgtttacatcaagcctgtaaacaaaaagaaaatggtgaattttgacgaagagctgcttgtcatatatttctccattttgaattacattcgggagacgcatggtttctcttttgaaattaatatccagtatcctcttatcagctgcgacaggttgaagaagtcctatataggcaggaatctgggatgccgaagactaaaacaaatcaagtacaagtatttctcggacaaggctcttcggatatgggatttgtgctatgctttctttgacagggaatataagattgcgatgaacaggcaggcggaagactatctgctggcgaaagatttcgagcacatctttgaggtcatgattgatgctttggtaagtggcaatgacaaacaaaatttaccgaaagaactcacagagcaaaaggacggcaagttagttgaccacatgttcgtcgggcaaggacttattgaacaatcggatttgacatctgagcttacttattacattggagacagcaagtattacaagcgttccaggaatgacaggacgcagcttggcgacaaatcgatatacaagcaatacacatatgccagaaatgtcattcagtggaacatgaatctgtttttggacggtgacggaaacggggagcatccccagttaagggacacattgactgaaggatataatcccatccccaatttctttatcagtgcacggattcctgacaaaaagacaagtggcggtaaattcctttcctttgatgataaggagttgaaagcacaggatggtggagtacagttgaaccgccaatttgaaaatcgtctgtttgacagggatacgctgttgttgtgccactatgatgttaactttttgtacatcgtatcgttgtatggtcgcaacaataagagtgcacaagcagcatggagagactatgtccgcaaagaattcagaaataagattcaaggcactctcaatcgactctacactttcagaactctgcagccacgtgatggcatggattgctatcagttcattcaggataatttccaacggctgaacggcaaattgtatcgtccgaagagtgatagtaattatctgattcttgctttgatgaaggaggaagattccaatatatggaagtctctcaaaataaaatcttcaacaataaaaagggaaacggctcaaagcaaagagcttgtggatgctttacagactcatttctatgtcagcgatccgtttgaacttgaaacggagttccatatcgatagcattgacaatgtcggcactttgactcaacaaccgaaacaagagattaagaatattctgacagggttagtacgaaaaacagatgcggattattccgattttgacagtcatatcgcaaagacatatactatggagaagataccgacatctgtcaatgtgatggatatcagatatttactgcctatggttggcggagagattgacggttattataaagtggataaagtatattttggcactaagaacggaaagctatgcttaaagttgaatctgtcctcctttatttcattgggcagtaatcgaactcccatatatcgcataaaaatgcagcctggagaattgatttccaatgatttgatggtggaattatacgaacaaaggatttaagacaatggaggaaaaacaattcagaatggatttcgatgcttttttaagatctttcaaacaaagtaagaatggctcatttgcgttcttattaggagcgggtgcgtccattacatcaggtgtccaatctgcggaagattgtatttgggattggaaaaaacttatatatgtaacaaacaacccgacaaatgaagcatttcttgatatacattctgactgttgcaggaaaaaaattcagacatggcttaatgagcaaagaggttatccaatagaaaaatctgatgaagaatatgttttctatgcagaaaaagcattcccattgtctggcgatagaacaagatattttgagagtctatgttttgataagaatccgaatattggatataaacttttgtgcttattgcataaatatagagtcttaaaatctgtttggactacaaattttgacgggctagttgaaagggtagctcatcaggcaaacataactccaataaatataaatttagacaatcctgaacgtattcatcgcactgaaaatagccaggaattattatatattgccttacatggtgattataaatattctgaacttaagaatactgctacagaactagattctcaacaggatacatttaaacatagacttaaagaatactttgtagacaaaaatctaatagtaatcggatacagtggaagagataagtctttgatggaagcactgactgaagcttttagtcatccgggggcaggccgtttatattggtgtggatatggctcatttataaatgaagacgttaagagcttacttgttgctgctagaaatgcaggaagagatgctgtatttgttgaaacggatggttttgacaagacaatgatatctatactcctttccacatataatgatgagcaagataaataccaagaaattcataagatactggaagaagcaaatacggagatttcaattacaccatttgctttgaacagattgaattcaagtgggtgtattaaaacaaatctgtatccgctttctattccttctgatatatttacttttgagattgcttttcctcaaaatgagacaccgtggaattttctcaaaagcagaataaaagggaaggatattattgctatcccttataaggggaaagtatttgcttttggctattcagagcatatacatcaagcattttccgattgtcttaaagaggatagtatatctcgtttaccattgtcaattaacgaattgaagggtaatcaggcactgaaatctgtcgtaatcaaaactttgatttgtggactatcttctagttgtggtaaagaagcggttatttccaaacgtttgatttgggataaaacacgtcaattcggaaattataaagatgtttacgaagcaataaaaatagatattgtatttttggacaataagaattattcccttatgtctgttgttccaacattgtattttaaagatgaaaatatcactagtgacagacgtaagaatctaatgttggaatatcttgacaaaaaacacaatactcaatatgatgagattatctctatttgggaacaaattctttttaatgggcatcagcgtgcatttgattatccattaaatagtggttataatttcaatttcaaaataagtaataatagaggattggttgcggtagactatacggaaaaaggtcttatatctcaaactcagtttgttgataaaaaaatagtatattctgggatttatatatctgagccaaatcttgccttttgtagtaagacatctcgaaaaataatccacgatactaatccgatgagagggcttctacaaaacaatccatatgattatgaattccagtccagttttaatactaatgttaaaattggcgtaatctgtccgagtacttatacaaatcaatttcgggattttcttaatggtctaaatggaaatataacagctccaaaaacagattatttgcagccatatataggttttgagcaaatctattcagcttcgctagatatacctgcagttaattctaatttatggattagctgtcgtgagatacaacaagattctgtaggtttggcgcaaaacatatgtaaattcgcccataaaattgccaataacaatccgaatattatcgttgttatttttattcctaaagcatgggaatgccatcgctctttcaaaaaagatggtgaaacttttgacatgcacagctatataaaagcatatgcggctcagtatgaatttaccacacaatttgttgaggaaaaaacaatattcaatacttacatgaagaaccaaatatattggtggctttcattagctttgtttgtcaaatcgatgcgaacgccgtggactttatctgatttggacgcagatacagcttatgctggcattggatatagtgtcaagaaggaagcaaatggcaaaacgaacattgttgtaggatgtagccatatatataattccaaagggcaaggattaagatacaagttatccaaaatagacaatccgattttagataggaagaataatccttatctgtcttatgaagaagcatacaagttaggtatcaatgttcaagaattatttgtgaagtctatggataggctgcctcaaagagtggttgtacataaaagaacaccgttcaaagaagaagaaatcaaaggtataaccgatgctttgtctcacgcaggaatcaaaaatatagatttgataacgataacaatggaagattccataaaatgtattgaccaatatttaaacaatggatatcctgtcaatgccagttttccggttatgcgaggaatttgtttccccgtctcccaatatgaatgtttgctgtggacacatggaactatagactcagtaaggcaagatagaaattacttccctggaggacggggcataccttcgcctttaagaatagctaaatatcatggtaatggttcgatgcaaacaatagttaaggagattcttgggtttaccaaaatgaattggaactcctttaatttttatacaaaatttccagctacaattgatacgtctagtacattggcgcaagttggacaattattgggacattacgatggtagaacgtacgattacagatatttcatctaatgtactgatatggatagattgaccaaagaacaacgtcatcgtaatatggctgctatacatggaagggatacaaaacctgaaatgatagtgagaaagttcctttttagccgtggcttccgctatcggctaaatcacccacggcttcccggacatcccgacttggtcttgcgcaaatacagaactattattttcgtaaacggctgtttttggcatggtcacgaaggatgcaaatattatgttctaccaaagacaaatgttgaattttggaagaataaaattgaacgcaatcggagtagagatatagaagaacgacaacagctaacttcaatgggatggcattgtattaccgtttgggaatgtcagttgaaaccaaaaatccgccaacagactttagatgctttggaatatacgctttgccatatttatcttgaagacagaagaatcaaatcttataagacaactgaagaagaatatagtatggtggcagaatccgttgaaaattatggcaaatcgaaatgaatatcatgaaaatgataatttgaaatatggcaaaaaacatagaaatacgaaatagtacagctgagtttctcatcttcatgcttgaaggtaaagaggatgggattcaagtgatgtataagagtgagaccatttggacgacacaaaaggcgatggcgcagctttttgattgctcaactgacaatattagtctgcacttaaaaaacatatttgcatctggggaacttgtcaaagattcagttgccgagaaaaactcggcaactgccgctgacggaaaaaactatcaaacaatgttctataatctcgacgctattatcagtgtcggatatcgtgtcaattctgttcgtgccactcaattccggcagtggtgtacgtttgtcctccgccagttcgctatccgtggatatgtgcttgatcataagcgaatggagaacggggctttcttaggtgtagattactttgaacatttgcttgccgaaataagggagataaggctgagtgagcgtcgtttttatcagaaactgaccgatatttatgctacggctatagactataacaaagatgctccgacaactcgtcttttcttcaaaaaggtacagaacaaaatgcactatgctgtgcatgggcatactgctgcggagttgatagtcgaacgagccgatgcgaataaggaacatatgggattgaccacttgggagaatgctccgaatggaaaaattgtcaaaacagatgtgtctgtagcaaagaactatttgcaagaaaaagaattggaagaaatgggcaggatagtcaatgcttcgcttgatatggcagagagtatggctatgcgtcatataccaatgacaatggaagattgggcaaagcgaatagacaaattcatcaatttatttgatagtcctatattacaggatagtggaaaggtgtctgccgaatatgccaaagagtttgcagagtctgaatttgaaaagtacaggatcattcaagaccgccttttccaatctgactttgatagatttgaagataatagtcttcctgcattagatattgaataattataatgtcattttgagattggcaaaatcgcctttgggatatggcagattcatgtcgttaaattggcaagtgttcggacaatagttctgtgttcatcatctagtatctgcatttatggtgaccgacgttactccagtataccacttaaaagcaagaaaagagttcacataagagttcataaaagaaccagtagggttcataaaagagttcgtaaaagcactactgaaatacacccccaaactgcaataatgccaaatctagcttgcagaggattggcaaagtctcacgagcgatttatcgcttggggtattgagttaccctaactcaataaggtttgtataatgggcaagccctgtgagcaattaagtatacaaatttcgtttttgcgatggctggcgaaaagataaaaggctcaaataacgcctttttctcaccaatcagcttgctgagagatttggcactctcaaacgacctattggtcgcttggggtattaggctccccatacaagataatgtctgtacaacgggcaagcccatggcttaaaaaagacgtgctttgaagtaaaatgtttgatatttttggctttgattgactgtcaaagacgattaagagagaataattgtcgtataaatgtgtatttatatggcaatttaaatggcattaatgtcacatttggtgttacagtagtgtcgattcagaacttcaaattgtatctgaacattctgccaacagagaaagtgaacaaaggattgaaatcactttggcattttgaatgccatttgccgatgcttggataaggattgttccagcagatttgccgaaatataacaggtgctaatattgaaaaacagcgaaagtagaaattatttagctagtaatgtgttatttgatatgccaatatgaagattgttgttttgtcataaccccaatagtacaggcataaatatccgcaaatggcaaaagatgtacaattattccaaatggattgccacaaccaatctaaagagaattagccacaataccattggcaattaaaacggcaacgaccgatttcgtgatttatcatgaaaccagtcgttgcacttagactttgacttatatacgaatggacacttttagaataaagtcaagtggagagtcaataatggtaatccggcatgaaccgataaatgccacggctttcctgaatcaccatccgtttgttcgtgagaaacttaattatcttcacaatcttgttgtgattaaatttcgttcctgccagttcgtaggctgtggtcagttcttcttccaaagccttatatcccgaaatagtttctcttccctcaaaagccagtttgagagccttgcgatggattgtttcgtggatgtccctataaggggagaagggttcctgtttgggacgacctgcgcttttcttggtcggcacatagcccggcagaagttcgggaagtgattggtcattgatgcagaaggcaaatggcagaaagtctttggaacgggtatgcacactttccactttgctgatgttgttgtcgtccttgtctttttcgatttggatgacagtctcagccttgttgttgatttccgtgccaatgtgtccacgggcgttttcatcgcttttgttctgatgaaggatggtgtgaagatgaatctggtattcgtcagtccactgcatgagtttggagattacgcacgtggcttcgctcggagaattaatgtcatagaccaagtcgcggattccgtcaatcaccacgaaaccgagaccctcaatctgactgattgcatcatctatgatagccaaacgctccttggggttgaacttgcgtagtgcgagaaaatagaaacggtcgcaatcctcattagtcggcaactctgccagtttcatgatacgatgcatcacaatcatacaatggttttgactttgttctgtgtcgatgtaaagaatgcggttctttcctttagggaagtccgttgtgtagttaagaacttcctttcctgacaaagctgctgccaccatagccgacacattgaaagtctttttgcttttagccttgcctatagatgcactgaaatttcccaatgtcccgatagccacttcgcctattttcagaacttccggctcctgttcgtattccctttccaagctgagcattgtatcttgccatcttgtagcgacctgagcaagatcttcaatgggtgctaccgtttccatactcaccagcttttaggattggctttgcgacgtgtagttgcaagcattcgggcgtgttcttcctctatgcttataggcgattctccttttctgccgctttccaaccatttgtccaattcatcacgatagacaaacaggtgcttgccttgtttaatgattggaatacctccatgtttggctttgtaataaaaggatgattttgagatgcccagatactcgcagacttcatcgacggtcataggcacatgagtgtctttttttacctcgttatactgctgatgaagtttttctgtcaacagattttccatagttgagattctctcgcagagttcgcctaccacttcaggcaggtcattgaatgttaatttgtttctttgcatgatataacattgtttttgttaaacatgctgcaaaccaacacaatgatgtaatgctgacaaacctcagaaagcaataatattccggtctgtgttgaataaccctaatcggttgaatttgctttttattcttgggcttctttcatacatttgaaatgataatctccggttttaggaatatcaagggctattttgcaaactccgcatgtccggagatttttagccagatatttaatcgaagcatcttttagttcatgtgggaatatagtatgtatgaatgttgctctatctataagagaaatgcccaatctctccccgatgttccatacgaaatgcatcaggtcaatagaacggagggaattatctacttttgaacggattggcttgtataaatcagactgtccgtgcgcaaaatactctatgttttcatgtagaatttcaagatcttcttttgaaagaaattccgtcattacaaatgtggtatattcatgaatgacacgcttaatgtctgcctgcctttctgctttttcacgttcaatttcagcggcacgcatttcataattattcatatagtcgtgttttacacagttttctacaactggcttttccaaatttgtagatactaattgaaaagtgcgctgtattctaattgaaaagagctccatccataacttgttacaaaattactataagtttaaaatattcatttatcttgtctcattttttgtgtttccttaagcctataagacagtccggtcatattaaccagataagctttatgtgtaagcctgtcaaccattgccgccacaagcaccttgtcctttatgatttcattccatctgttaaaagccaaattagtagtaatgattgtagccttttttccggctcttaacgacaggtggttaaaaagcagttctcctccttccttgtcacaactgacatatccgaactcatcacagatgaccagatcgtatttttcaaaccttaattgtagcgtcctcagtgtctttgctgatttagcctcccttatctgggtaagcaggaccggcactgaagtaaacaatacggtaaagtcctgttggcaggcctttattcctaaagccgtagcaatatgcgtctttcccgttcccggatttccatacaggaccaggtttcttccctgtctgatgaagtccagtgtctccaattcaggtaatattacctgtgcctctttgggcatgtcttccataacaagctcatgcagatacttcatttgtggaaatcccgcagatcttatccttgatcttcttctacactcccttctcctggcgctttcctttccaagcaattccgtcaagaactgcagatggttccagttttcttcagctgccaatgaaagggtgcattccagttcctctttaaaggccagaagcttcagttctgcagcatagtcataaatggtttctttttctgatttcatatattataaacttaaatggttggtattatatcatgcacttcattgtatcctgtcatgagcgccgtgatgccttcaagcatatccacagcttctctttctatattctcctgttgtgccgggagaacaggcggttccatggtttcttctgtctctccctgtacgctaccatgcagcatggcctttacctggtccggagatatctttctgacaccacgtccggtcagctccttgcatgccgtgacaatgtccgttccggaaaatccattttttcgggcatagtccagcaacagaacaaacgtcctgttgtcctccttgaaatggatgtcatacagccttctcagttcttccggtgctctttgccaaaccacagagtggggcaatgcccccggtttacgggaaagtgtacgcaaatagtgctccagcttgatgcaccagtctccaccgcaataactgcgttgatgagaggccactttctccttcccgtacaggatgacgattttttcactataaaccttgacatgtactttttctcccacaagagaatcaggtacggaataatgaacatttttcatgctgatagttgaccatttatccacaatgtactcatagacctcaaaacagcccagattaccgggaaaaggcttcagcgatgacaggtcagcttccagacgtgatgttttctccgctgttgaaagactgccttgctcgttgttgacctgcatacatacccggtttaaatgctcctgggcagaatgtatatcaccaaaatggtctgtcaggcagaaagctttccttctgacatattccacgctgcgctccacatgtcctttctcccatccggcccgtacattacagaaacggtactcaaaacaatagaaaccggacatcttcatcaaagcttctgtaggtttcttatcaccaccgacaaagctcttgacggctacacgcatattgtcatagaccatcatggcggggacaccatgtatatccctgaaaaagttacggtgggattccatgaaggcaagcgtattctgatgcctgaaaagataggcgtatctgccattgctatgcccgaaagtgaatacggccagataaaacttggttttgacgccgtcaataaaaagaagaacttcaccccagtcaaactcggcaatgcatccaggctcatagaacaaccggataaaggcttcgctctttttcttctctttgtatgactctatattttttatataactgcatactgtggcgtaactgatggtgtatccttgagataacagaaactggtggatatcctttttcaacatgcgctgtttgcgaagtccggtagctatcttaacggcattcttcttcaggcaaaatcctatcttatccttaatctcttgtgtgagccggcgaggacggcgtctggaactgtcatacctgggctggatggtaagcaaatcactcaaagcctcttctggattgtccgtgcggatggctgattcgtactttgaaagaatattgtcaacggtatgacggctgacatgaagttcacgagagatacgccgtttgctataaccgcatactctatacatgtgtattattgattgtctttctaccatagtcttcattttacctttgcatttggattatacaaaggtcattatacttatcctatggtggcgcaattttcaactggaatattggcgcacttttcaattagtatctacatctcagggtctatccatgtaagaaaatcactgattatcgtatacatacccttcacataagaaaaatcacattttctgtttacaaaacatatcggctcattatgattgatgcggttacgcagttcacgaacttgtactataatatcgttaatctccttacgtccgaatccgggaggcagtttcttgaaaatccggcagggtacaccagccaaaagcgcatagtggtgtgtttcataaaagctattccagaagcccagggtctgttcagctattactctcccagtcgtaaccctgacaccccgatcggcaattttcttttctgctttcagaacctctttcaatatatagtcattggtaacttttttctttgtccgcttgttcgtatatgtcagagaaggagcaatcatgaatccggttttctggttgataatccagttaccatcggaaaaatggtgtgccagcgcataatgcagttggttacgtaatataacttcaaatgaagacagtaacggatgaaacgcttgtgctattttcatgttggcaaaatagagcatgactgccttgtttttgttgcggttggtcgccctgtaatatttggcgaccctcgaattggaatataatctgactacttttttatatttcattttgcatattcaaataaaagtcgtacctttgtatcgtaatgcttggtaaagcctctgttgtcaaaacacgtaaccaagttaaggatatacccgttcatcaagaacgggttttttcgtttgtggccatccttttgttttataatacaaaagtacgaataaaaagtgataaacagaaaaatgtagcaaagttattggcagataggcgttttaggaagatggcttgaaaaaatgaaagacagaaaaggcaatgaaaaagccaatatgaggatactctatgaaattataaaggttatataaatcttcaatatctcataaaagattatcctgagaaatatatgcctttggattttgaagcaatcaagaattctaaagacagatttgttatagtaaccagtatgtattaccggtgaatctgagtgttttgaagaacggacaaataaagaacgcctattggatatatgtcaggcatcctgttcactcaccattttatgtcctgaaaaatatatagacggtatccctatgttggatggaggtgtatgcgattctataccagtatgtcgtgctagggaagatggctttttaaacaatgtggtaattcttacaaagcccaaagaatacaggaagccaaacaagaaattctatttgccgaagttccttctacataagtaccccaaactgagacaccagctggtgatgcgttatatcggctataatgaaatattggattatatcgatgaactggaaaacaaaggatatgtttatgttattcgtcataaaggcgacatgagagtgacaagaactacaacaaactatcatttgctaaaagaactttatgacgagtgtagaatggagggagagaaattaatacgtgatatggaacttatttctcaaatttcctttgcagcaattttcaggtatttgcaggaattttcatgaggtgtccaacatgtcaacgggcgcatatttatcacttttgcagtttttgcatgagatgccatatatgtcattttcccattgccatttggtcgcaaaatttagggacaggaacgatatttgagccaaatttaccctttaaaactggttgtaacaagtttcaaatggaaagtgttaaaaagaaaaaagaggccatctcaaatttattttgagacagccacctctctttcttctgatatcggtttgttggacttggctggattttattggaatatcttctataacgtatccttattaagtttcatatgataaagcaaagtatgcaaactaacgttgaatccgagtctttgctaacacctgttttttgctgatttctttatatgagacttctttctgctgagctgatttataatatccggacttaaagtgaggattgcacttttttaaagaaagtcaatcagtgtgctgttaatcccttattcctccatactctcatattcctcgaatatcctctccatagtatcggacatatcaagtgcgttgattacatattctcccgtatcgttgtctgtagccatcagtgaaatgatttttccttcatttacacgatatacggcaatgtcgtccttctccaggaaagggtagttttcccttgccttttcaaaatatccggcacgcagcagtacattcagatgattgactatataagggctgtgggtcgataccatcagtcctagtttgcggtcttttttgtttttatggaatacctcttctactaggttgctcataaaggctctttgatcttccggagcaagactaagttcgacttcttctatatggatatggacatactttcccaatttgttccggttgattcccagagtgaattttgtaagcaggtcctgtttgtacagatagttcaatacagaacgttggaaagcgtccttgaatgagaactcttgggcgaagtaatgaacaattgcaaccaatggagctgatgtctggataccggaagatgcgtatctcagttctatcggtacagcatcattctgcaaagattcaatggtaaatagtttaggtctgttgcctgatttacggactttcattttcagattcagatactccagcttctgttctttaatgacatccgtagcatcattgaagtcattgaaggtttcgtgaaagaagaagcccaggttttctccctttactgagactgctttggatgcccatataggaatcaggcttctcattccggaaacataagcttctttgaagaatatcaagtccttgtccggtatgttaatgtcagactgcagacctctgttggtatatttcagggtatatttgttcccattaatttccacggtgtaatatatttcggtctgtgctgttatcattcccttcagtccatcatgtagcagtgagttgaaacggagcttgaatggagaacgggtgattttcgcatttttcaaatacgaacggatatttaccattttgtagatgtaacgcataagtactattactttcataattatactcttaccaccggctgacttgcctatgaatacggtcaatggcttgatatcatctatttccacttctttcaatggaccaaaattctttatgattatagattctttcatgataatcttgttcttttctatctgacaaatataacgctaattaatggttaacagatgcttatattgtatttttatcttgctaaatgctttgtctgttgttttacacggctgcaatcattataagacattacctgttttcttgtattttagtgggtaatgtttaaatttgtaaccgaaatatattgattatgtttaaattctctgaatctacaaaacggaaactgggtaatgctatagtgtatatagcatatcatacatcaggtctttgtaggaacaaactattgaaacttctgtatctgatggaggaacatatggctctgaaatatcatgttccattcatcggcatgccatatgaggtgtggcaggcaggtcctgtggcaaaggatgtctttattgacctttcagacgtaccctatattttgaaaggctttgtcaggacagagttcagggacggtggaatttttattgaggctatagccgattttgatgacagtgagttctctaagtgtgaaatagagataatggactatgttctggtcagatatggtaatatgacagcatcagatctgtttttagaaacctgtaagaaggatagcctgtggtatcgggcagctgtccgtaccgggttactggaaacattcaacaggcaggaatgcaataactccgacctgcagattaactttgcagaggtaatgtccgatagttcggcagaggtgtattgcgagagcttgaatatacggcagactgcaaatcttttaaatgtagaattttatgtttgaaggtgtgcctgtttctagggacgtatggtacgatttaaatgagataacgaattgttattggcaagtggaagttagttgttaaattttggtgaaaattcattattcgtagagaaaaagactggctctatcttactataagcaatccatagatgtgactccttccttagtgaaaccgataaatgatggaatatctactaattcgacttcagcaattgtggccttcagtttttcaagcgtaccggtaattttaagataaagcgtttcttacaatttgtttttcgcggatataatctatcatttccttattagctttcccggcccttgcaatatctatgatggtaatcagattcttttgaggattatccttaatacgtgcccttgcttctttccatgccaagtcgtgtgacaggtctgacaggtcataaggatctgtatccttatatttggtaatggcagcatccagacaacgcttgtctgagcctgaaatgtagttcatatcaggtttggcagaagcataaattttctgttcatgcacttctattccggcaaggaaatcattaaagctttcttctgttggcttttcttttacagcctgtaggaccctataaatataagtcggcgccggaccatacttcaatgccataaaagagtcttctataagtacctttccatatttgacaagataatcctgttgtgcaaaataaagaattctaaaaagctttgcacattcaactcctttggggaaactctgcataatatagagtaatactgtctttatttttgtaatctgtataaaagttttcatttttatctattataaccgatgtatactcccaaatataatcatttatttaaaaacaataatctttggttatagtttttatgattgtaatacctcctaataagtctatccttcctgttttaacttgtcgtacttcctgccggtagtttctttctgtgaagttcggataagaaatattctaattcttataatatcgtgttttcaataaaatattaattttgcaaaaacgaggaaaatcagtgttttgtcctctttctcccgtatctgatctttctgcgtgataaataattattttactattcaacctaccggaaataacaaatcgtattcaaatagaattatgacttgatattttaccgaataaagattagatttgtatggtacttgacacaatgacactggaggagcttataagagaaatcaagacagattttagtgaagtaaaaggacgatggaagaactacgtacggaaattcaggaaaacagctcaaaaaaggacaatgttcccgtggttgtgggaagcgaatatcaagacacgaagattcaacgaatggtacatttctttttatgcagagtcgaaaaaagaggttggtattttgaatcccacattcacaatgttattcaagtataaaggacaattattggtaggtgcagtaacaaacgacgtggttcttatttttactgggcatttttttgacagatacaaagaaaggttctttaaaatacataaggacagccgtccggttacaaatcgggaaataatgaaggtgttcttcctgttcaacagtaactattgtttttacagcaaagaaaaagaggagaatgtaagaggttactgctatgacggaatgctgttaggtgactggattggagaagaaggtggtttcgtgaaaacattcatatcaagacaggagatgaagatgaatcagtttgttgaatattttgaattttttaagatgtggattatagaagatatgttcaaatccaggaaaggttttgaactgaagaattcactcactgaatacataccggatacatattttgaatatggagagtgggacaagttcctgtttgagcgtgataatctgagactgataaaggcagcggaggaaagccaggagatatacatgaagaaccgggaggaatatagaagatgttttcagctgatagacgcagtcaatatcaatatgtttgaaaagagaaaacatatttaggtatattataataaaaaaatattcagaattgtagcatattggggaatacctaattttgctcggactattaatttcttaaatagctgcataaaatatagtatctaatgatgcataatggctgtgaggttaaagatgttatgcaaattcctcgggacttgttttattattagtgtctgataaatatatttgatgggatgattataaatattgtttttatgtacaagtcctttctctaaattgagattgctttataattgtgtatatatcaataagctataaggtaatcgaaaagttttattggacagcaatagttttatttatataaaattagtatcttcgttatgtagggtaaagagagtattccttataaaccttcttcttcaggtgtacttgatatcctatgccctcttttaaaagagggcttttttatttgatagtattatcttaagattggtgatatatgcttataagaacatctaagccatatcttattagagtttatatctaatagttgattaaaagctatctttggaatatctttgaagtataaaaagcttgttgcaatattcttcacacccatagaccggtgcttgcagcaccggattaactccggattaactccagttgagtttgaaactttaatgattacatttaagggacatttactgaatgtctctttttaaacttggaaccgtagatctgacttatgtaaaagtaaaaataaatatttcaatagaatattatttgtttctataatagaatatcatctgttgtaatttctgacccgaatatttttaatgtatatatttgtttatcagcgttataaaatttgaatatattcgaggctgagaaataaaaaaatattattcagacatcaaatatttatgattttgacggattttatagagaaaatctcaaaaatacatcgggggacataattttgtcccccgatgccactatagaggacaaactggggacaaaaatgaggaaaacatatgctaaaaagagaaaatatggttctcaaaacagcttattttccatctatataagtcattttctatcagaaaattataggttttgactgtataactatctgataatcagatagttagctatttgccgatgcaaaagttttgaaatatattttgcaatgtttcttccgaggttatacctccttctgcaacaatctcacttagttcgtggatacattgtcttaaatcctcacttaccaaatctcctgataattccaattgcaatccttcctgtactctatgaatagaatccaatgctcgtgttaatgcttcgtaatggcgtacatttgtaatgataatatcgttttggttgacttccggtaaggcagctgcctgtactaacttcttttccagaatcgttatattttcccttttctttgctgagataaatagtttttccactttcatgtcagcaaatatggctgacaactcttctttttgtgttgctagtaacagatctgacttattaaataaaataatcatctttttcccttcgcagtgtggaagaatgtcggcttttaattcttcgaaccgcctttgggtatctgtagagtctatcatccataaaatgacatatgcttggtccatcttttggaaagtacgttctatccctagattttctattgtatcgttcgtttggcggattccagctgtatcaataaatcggaatgtgacaccttgtaaattgatcgtatcctctattacgtcacgggtcgttccatggatatcactgacaatggctttttcttcattcagcaacgcattcagtaaggtagattttccggcattcgtttctccgataattgctacaggaatgccattcttgattgcgtttcctacactgaaagaatgagctagccgggcaataacttgttcgatatgggtagctagactgctcagttcgtcacgattggcgaattctagttcttcatgatcactgaaatccagttctaattccattaacgaagtgaaatgaagtaattggttacgcaggttagaaagttctttactgaatcctccgcgcatctggctcatggctaggcgatgggtggaggcagacgatgaggctatcagatcggccacagcttcggcttggctcaagtccatttttccgtttagaaaagcacgttgggtgtattcacctggtagagcggcacgacatccattatagatcaggagttgtataacttgctgcaggatataagatgaaccgtgacacatgatttccgtactgtcttcaccggtataagaatggggggcgcggaacaaggaaattaaaacttcgtcaattacttcttctgcagaagaagtaattgacgaagttttttgtaacgtttcacttttttcttgcggaatttcactcgtttgttggaaaagtgtattattaatttttcgctttggggaacaaatctttccaaaagtaagagtatatggtgctcgttctgtcagtggcttgcctgtggcgggtgtaaatatgcgtgacgttatttcaatcgcttttgggccagatacacgaattattccgatggctcctccctgggcggtggcaatggcacagattgtatcttggtttatcattttcatttggttaataatataatgttttagctacaatggctgttacttcttctaaataacggcggtctgtttcattaaaaaagtttaatagattactgtcaatatccaatactccctttacttgtccattagcaagaataggaacaacaatttcggagcgggaaagagaactgcaggctatatgtccggggaattgttctacattgggcactatcaaggttcgagcttctgcccatgaggttccacatactccctttcctttatggatgcgataacaggcggtgcttccctgaaaaggtcctaaaataagttggtcgtctttaaccagatagaaacctacccaaaaaaagccgaaggcttcccgaagagcagcagcagtattggccaaaacacttatttcttctttttcatctgatattaaaagttcaaactgagggaggaaaagacggtaacgttctactttattactagttgtttgtttgaaactggtttccatatttttatttgttttatgaggggacatcttgttgtttttttacaaaaaatggtcttctatgaagcgatgtcccctgttaggtaaaaagagttggcttattctgtaaaaaatctgtttatgccaatcttcttctggataataataagaataagtcttgatagatgatccggtgaatcttatccatattatatagacaactaaattgggaattatattctttccaagactttttctatcaaaccatcaatagagtttttatagccggtattggcttcctttattagtcggttggcaatcaccatacatacagtcatggctttgtgtcccatcaagcgtgctaatccggcaagggcggaactttccatttcaaagttagtgatgcgatagtcattgtattcaaatttctcaatcttttcattctgtttaggatcggccaatgggatacggagttctcgtccttgcggaccaaagaaacctcctgcggcgatagttacgccacggaccatatcattttgcgcaatgcggtctattaattcccggtcggcatcaataacgtatgggtgggcgatgcatacattaccttcccaccccatgtaatctataaaagcttgttctaatttcagatcgcaaacctcattgcgtccggcgtagaaattaagcagtccgtcaaaaccgatagacttttcagaacaaacataggtaccaacaggagtataaggctgtaatccgccacatgtaccgatacgtactaattccaattggcgcaagtggtctttttcataacgggtattgaaatcaatattggccaaagcatctaattcattcatcacaatgtctatattgtcacaacctataccggtggaaactacggtgagacgttttcctttataagtaccggtaatggtcttgaactcacggctttctatttcacattctttagtatcgaaatgagaagctactaatgctacacgcccgggatcacctactagaattattttatttgccaactgttcaggtttgatatgaaggtggaagatagagccgtcgggattgataatcaactcagattctgcataatattttttcataatctttatttttgtggttaatggccagtataattaatgttatatttcttgtctttttaatgagtatgcaaacagattatttcctagatgtagatgttacggatttataaactttcattgatattagcattatcaagagaaaaacagttccattcgcatccaagaaaaatatattaatcgttgaatactagttttatttacttaatggctcattaccgaaagttgtttcgggttttgcaatattttcacgcatggaggtatctgcttgtatattcttcatgcggtaatagtccataatacctaggttgccactacggaatgcttccgccatggccttgggcacttcggcttctgcctgaattacattcgcgcgtgcctcttctgctttggctttcatttcctgttccaaggcgacggccattgcacggcgttcttctgctttggcttgtgcaatattcttgtcggcattggcttggtctatttgtaaagcagctccaatatttctgcctatatcaatatcagctatatcaatagacaggatttcgaaagccgtaccggcatctaagcccttgcggagtactaatttagagatagaatcaggattttccaatacggatttgtgattttcggacgatccgatagaggacacgataccttcaccaacacgtgctagaatcgtgtcttctccggcacctcctactaattggcggatattggcgcgtacggtgacacgagctttagctataagctgtatgccgtctttggctacagcggtaacgggaggggtgtcaataaccttagggttcactgacatttgcacggcttcgaatacgtcacgaccggctaggtcaataccagttgccatttggaaagacagttcgatattggctttggacgcggatactagtgcgtgcactactttttccacatgcccgcctgccatataatgagcttccaattcatctcgggttatgttgcttaagccggctttgtgtgcttcaatcattgccgggacaatgacataaggagggacattacggatgcgcattaagaataattgcaccaatgagatgcgtacccccgaaactttggcagacagccagaggaaaaatggcacataatgaaagaatagtaccacgaaaataattccacctcctataaggatgaaaggaagatagttgggttcgatcataataatcagttgtttaaaagtaaatatttatatttgaacagctcaatatcaagtttttgctgttttcactattgtctaaaatatgcttgaatgagaatgtcaatcaagaaacctgataaattcgtatttgtaagtcatttccctatcattggttgaatttgcgtacaatcaccgttccttcaaccattctttctacataaatgggagtattctcatcaatcaaaccatcggcagagcgcacttcgatgatgtgtccgttaaagtttgcattgcctatcagtgcaaggcgggttattgctatgcctttgtctccgatgcggatatgggttccttttaggggatcgattttataatccagtgttttcttcaaagaaagcttgtccatggtttttgagtgcataaaccaaacgataatggctatgcaacttaggacggatgctatcaaagtaatgaatcctgctatcggtcctaatgtgtcgaaagcgtaatagttggcatatagcaggcagatggctgatgctattccggctatactgatgccgggaataaggaaaacctctacaataaagagaagtagtcctgccaagatgagcgatacgataataaatacttccataaatatctttgtattagtgtttcaacttctttatttcttcgttgcggacactgatatccagttgggccatttctttcagaagttgttcagtacgtttttccaattccaaaatggcgggtgtcagattcttctttcgtgcactgttcccttgggcatattgttcgcgcttgtcatccagatttttcttcaggttgtcataatccttctgcttttgtattctttgctggtaaagtttgcgtgcttcggcagagcggaagtcgttcaatgtgtggtaaacggcagaatcatctattatcaaggtgaagtctttttgttgttctccggattctttggcatacattatggctgccaggcgttgcttgccggttcgtactttctcttcatctttccaagtggtacggatagagcgcaggctggctgcatttatgatgatctgttcgtctgtactttcataattgtatacttcttttgaagagttcggtacaaacacatagatacagactttgttatcaggctgatagcggtctgaagcaaaccagccgatattgttgaattcatcaatggcatacatatagtcattggcgggagagttaaatggcattcctatattatcgggacgaagataattgctattttccgaatcatagcgagttacaaaaatatcgtatcctcccaaagagccttctccatccgatgcataatacaaggtaatgccatctgacattaagaagggatagtttacatttccctgttcattaagggacgtgagaggttcgggctcgctccagccgtccaacagacggatacgggagtacagttgcatcttgccgtctgtgctttggtttccgtagagtactttattgcccatttcggtctgatagacagtcccggatatggcaggatcgtgatagagtgcccccgattctctactgattttatatgcttttagaaaatcatttttatcgactacaaagctgtctattacagtaatgttttccactccttttatcatacgggctgcttgctttatttgttccagctctgcttcagccatttcggtagggcgttttttcttttccaaccattctatgtgttgttcgtagttatctacggcatcgtcaaaccgatagatgtcataatatagttttcctaagtagcggtatgcgtcaatgactttgcgggcggcgcttttttcaaggtagggctgtgcttcttttttttctcctgtttcataacaacatgcaccataccaataattataattggcgttagaaggggcttgctttaccagcttttggaaagcaggtttggcttgttcaaattctccgttcaggaaaagttgtttggcttgcgccaagctttgtgccgcagcgttgcctgcgcagcataaagtaaataaaccaatgatatattttttgtacatagttagtttataatccgtattatttagattcaaaaatacaaatattaattggaattctcatgctttacataattctattttgttaaatcttccataaatcattcttttcatgtacttttgtgccctatttttaaagaagatgtatggcacaatttacggaagacgagaaaataatgcgaaggttggagcaacgctttaacaagggggtggtaaagtatcgcttgattgaggatggtgataaaattttgataggtctttctggtgggaaggattctttggctctgttggagctattggcaaggcgttcacgtattttgaaaccgaaatttacagtgatagctgtgcatgtaggcatgacaaatattccttatcaatctgatttggaatatctgaaaggctactcagaggatttaggggtgccgtttgtgcattatgaaactttttttgatccgagtaccgacactcggaagtctccttgtttcctttgttcttggaatcggagaaaagctttgttcacggtggcaaaggagcaggggtgcaataagattgctttaggacatcatatggatgatatcttggaaactttgttgatgaatattacttttcagggagcgttcagtacaatgcctcctaaattagtgatgcgtaaatttgagatgacaattattcgtccgatgtgcttggtacatgaagcggatttaattgaaatggcacgtatccgcggttttcgtaaacagatcaaagattgtccttatgaaagtttgtcgaatcgttcaaatatgaaagaggttttatattctctagaaaaaatgaatcctgaagcacggtatagtttgtggaaatgcatgacaaatattcaggaagaattgttgcctgggatgaatgaacacgatttatagtgaatatggttgttttgttattagggaatataacgaaactgcttatagttagttgtttgtacttgtgtgcagcttaaccaactatcaatattattaatgtatttagatgaggaagaatgttataaagttatccttcctgttgtttattgtgccggatacaaagtgatgtacatgtctggtttgttggggaaagtgtagaaatattctacaatgaaaatgtggatctttttctttgaaaatagcttattcttaatgtatttaattgataatcaaagccagtcttgttttggcataggctttgttttctctttgtcataagaataaccatttaaatatattaggatatgagaaagttttttgttgtgttagtatgggtaatgggattaggacttgcagcgttgtttgcaaaagatatagtacgtggagtgaagaatgtgattgcgataaatcattttacccctgttgaggtgaataatgctccaacaggatggcatcaagacttgtgttgttatcttaattaatttgccgtcatagagattttgttcataattgaaattggaaacaactgttttttatggcagctgtttccaatttatttgtattcagttgtccttatactcttttcgccaagtgatttttgtacactagcctaggacaaatgtaaaatagtaaaggggattggatgaatagttattaatgaatgtttttaatgtcatcctgtactatctgatccatttctttcattagttttttgggattctttttaggggagaatcctttatctttttcttcatgcaaaagatctgtttcagttatgttctcactccagtcttcgaacatatttgttgccggttgtcctgataatgttacattctcttctgcaatagggacatttctctcaataattttttccataatctaatctatttattgtttcctagatgacaaatacgggtagaaatggtttaatgatttaataaagtttgaagtttgtgataaatagaaagttcttgaacaagctagcaagacttgatttgcgggcaatgttttatttctttttttaaatgactttgccttgtaaagagtgcttctctgtcctttcaattgaaaaacaagtttttaacaagcggttttttcggtctgtttgaggtttatctgcaaaatcgtggggaaggactttggttcttaaaggactgttttgttctctgacagcttccggaaatgttcttgacgtatcagtttttctcttgaggaagttcggatgtttatgccctcatgccctcactgcctgtataacagactaattataaacaacttatatgcatatagtaaaaatatttgttctcacttatgctctcatgctctcatagcgttctaaaatatgttttcgtgtaacatgcttgtcctcagttatatacatatattgtgggctatttcaggcttgatagggagtagggtgttttcaggcttttttctcgcaagaagtgtgcataagggggggatttccatagaatgacggtttacaaagttccggtaacggtaaaaaagatcaagacgtttttaaaaaagataaccgccttttaaaaaacgcccttgtctttgatatggaattttattttggacatataattatacatacgtccgcacaagtctgtacgtatgtataactacttttttttggggggggctaacaaggataaaataaaaaaggctatcttcccagacagccaatcttttgttaaccttaaatctaatactatgaaaaacacagtgcaaatatacgaatttctgagatgggtccaaattcttagaaagaaaaaaagcttgttataacatggtttagcaaatgaacttttttcttaacaaatagcagattgaaagagtggaattggttgcttttttgttcaacggaaataaaacatgcttgttgcggcaataactcattgtattattcttaattcgattatttccattatctttgcactcccaaaatgcttgttgatatgcagttgttaaaagcataatggatattataggcagattgtttccagataaaaaatagattagaatatatgttgtctcatggtatttattcagtaattttgctgattttttcaaatgtctttatgacgtttgcttggtatggtcatttaaaaatgcgacaagagttcagttggtttgcagcccttccgttgattggtgtgattgcatttagttgggcaattgctttttttgaatattgtcttcaggttcctgccaatcgtcttgggtttaaagatagtggaggaccgtttgatattatgcaactcaaggtgattcaagaagtcatcacattggctgtatttacattattttctgtttgggcatttaaaacagaactgaagtggaaccatttagcggcttttctctgtttggtccttgccgtttattttgtctttaagaagtaatgagttttggttaataattgctgaatcctttttgataagcaaagtgtcttgtttgggcaatgaatcttgttcagatactttgctgattctaggaaacaagatggaatcctgtcgggttggtacgtaactttgatagattttccaacctttggcacgattacgattacgtcggatggcacgtcctcgtttggttaaagattcatacaggaatttgtcggtatccactcctcctattaatgggttattactgggagttaccgtttgatccatgccggcaggtaatattacatagccgttttgcaaaccgggaatcagtttgatatttagtttccatgatattgtcagagagtcttttcttttcaagaaaatgggatcattaaccggatcttcatgccatgtggtgtaaggagtgtagggagtaagacgcacaaagttagggcgtacccatttggttgtgtcgccgaagtttttaggcaagtctttcagaaacttcatccacggtttgtcttcggacatgattggagtaccttttatattgtctttgtccgattgaaagtcgaaatggatagactttacggcttctgtgttgatttttagttctccatctccattcaatagctcctgtaaacgaatcgagtcctgtttgttccattgtgcttgtgctgtcagtatactgatagtgcagaataatatgctaaaatttaccctttgggtcattcgttttttctttatggttataattggtaacaaaagtaatctggagtgagtttaatgctggttaaatttgagttattaattgtttataatgtgaatactttaaattttatttggttaataaaaggattcgtttacacctcttttgttgtcatggagcacatttcatatagacatttagatagttacttcaatatttggtaatcaagttttgtattttatttccagatatagtgacagggttcatattcatggtatgtatttcaattgatgtcagtacattggtcagataggcgatataggtctatatggatttatggggtccattctgtctgtgtgatttattttcggtatagaataaaaatagcccgttaatttttaataacgggctaaattagtgaaaatgataatatttatttggaggagagttgtgcatgcatggaagcagctgctttacgtccgtcacccattgcaaggataactgtagctccaccacgcacaatatcgccaccggcataaatagtcgggattgacgattgcatattttcatttacggcaattgttcctttgcgtcccaattccaatcccgggatggaactgggaacaatcgggttaggggagacgcctacgctgactatcgccatatcaatgtcaatggtttctgttgctcctggaatagctatcggactgcgacggccggaagcatctggttcgcctaattccattttctgtaaaacgacttgtttcacacgccccttttcatcggcaatatattctatggggttatgcagagtcaggaattccacaccttcttctttagcatgtttcacttcctccaggcgggcaggcatttcttcttccgaacggcggtaaataatcattgcgcgttctgctcccaagcggcgtgctgtgcggacagagtccatagctgtgttaccaccgccgattactgctacacgtttgccgaatgttacaggagtatctgaatcctcactggctgcatccattagatttacacgagtcagatattcattggaagacatgatattgatagaattttcacccgggatattcatgaagttgggaagcccggcacctgatgctacaaatatacctttgaaatcttctgcttccaagtcttccacactgattgtctttcctacgatgcagtccttcatgaatttgacacccatcttggataaattgtcaatttctacatctacgattttattgggtaggcggaattcgggaatcccatattttaatacaccccctatttcatgtaaagcttcgaatacagtgacatcgtatccctgtttagccatatctccagcaaatgagagtccggcgggacctgaaccgataactgccacttttatgttgttcttttccgctacttccggtacggatatttgaccgctttcacgttcgtaatcagcagcaaaacgttccaaatagcctatggcaacggcttcgtgtccggctttcagatgagtgcattgtgattcacactgtttttcttgaggacatacacgcccgcagacagcaggtaatgcactggttgcttttaaggttttggcagcttcaaggaattcaccgcgttctatatttttgatgaatttcgggatattgattcctacggggcatccgttcatacaagtagggttggggcagtccaaacaacgttttgcttccgttacagcttgctcttcattcaaacctagattgacttcttccttacggctatgtgaacggtattctgcatccagttcgttcatttttacacgggggatagccattcgttctttaggcttcatggctttacgtaagcttgcacgccattcggcatcccggccgtccagttctttagtcgcttcacaagtcgtcggcttttcggtgtctagtttgtgaatttcttctttttctatatctttgaaagctcccatgcgtttcaacatttcgtcaaaatctacttgatggccgtcgaattccgggccgtcaacacaaacaaaacgtgttttgcctcctacagtgatacggcaggcaccacacataccggttccatccaccataatggtgttcagagaaacgtctgtgggaatttcatattttttagtcagcaggcaaacgaatttcatcatgatggcaggaccgatggcgaaacatttgtttaccgtttcacgtttgattacttcctccacgccttcagtcactaatcctttgcgcccgtatgagccgtcgtctgtcataatgattacttcatcagagctttcacgcatttctttctcaaggataattaattctttggtacgtccggccaatacggtaattacgcggttgccggcagctttcaaagcctgtacgataggaagcatcggagcaacgcctactcctcctccggcacagactacagttccgaaattttcaatgtgggtggctttacccagcggaccaacaacatctgtaatataatctccttcgttcaattcacaaagtcgtgtagaagaaagaccaacttcctgtactaccagtgtgatggtaccttttacgggatcggcaccggcgatagtaagtggcatacgttctcctttttcaccgacacggacaattacgaaatgtccggccttacgtgacttggcaatcagaggtgcctctatgaccaatttaaagaccttttccgagaaatgttcttttgaaataatcttattcattttgctatactataagttcgttgtttttctgagttgattgtcaaattgataatttatgcaaaggtaggattatattttttaaagacaaaagaaaagccgcccttttgtgaggggcggctgatcctatcatgataaatccgtttttgattttgttgcagtttgttcttgatgtgaaaaagagattatttctttgttctgattttatatcctatcattccataatataggatgaaaaggaaacagggaacacagatccagtaggaggtctggaagctagttgcatcttgaaccacaccgcgcacccatggcataaccgctccaccggcaatagccatggttagcaatgaagagccggctttggtgaatttgccgagatccgccattgcgagaggccataatgcgggccacattaatgagcatcctaatgccataaagaatatgcaatagattgaaatttcagccggcatggttgctactaatgcagaaccaatgatggctatgatggcacatattttcattgcggtagcctggctcagatatttagggattaaggttgcgccgcaaatgtatcctactaccataccgatggaagggataaatccgtaattgtcacccggcagctccaatgctttggcatatccggttgcagttgccaaggctatggtttccacacctacataaaggaaaagagcaagtactcctaatagcaagtgaggaaattgcatgatggaagttttaccttctgcatacggacaggcaaccgcttcttccgcatctgtggcggcatcctctccggcagcttttacttcaggcagtggagccattaaggcgataatgcctaatacaacgaaaataccgacaataataccaaatggctggaacaaatcttccatttttatttggtctatggttttgccgattactaaggtaataaaaagagtagtggcaggccaagccagtttgttgcaaatacccatgatggaaatacgttttgcggcagactctatagggccaagaatagttacatatggatttactgacgcttggagtactgcattggcggcaccacagatgaatgaggcgaaaagaaaccatacaatagattctgttgcggctgcttggatgaataatccgaaagcgatcgcgaaaatgatgaatgaaagagccattgtttttttgtaaccgatggcttcaatgcatttggtggccggtataccaaaaattaggaatggaacaaacgtggcggcaagcaggagattggattctgaagccgacatttccattgaccgttctaataccggcattaggaaagagttaatgcccaatgcaaaaccaattgcaaaaaacatcatgcctacaaaggcaagaggtaccatgaaatttttctgtgaagtattcataataataggttaaatggttagtaatcaggttgaaataataaaaaagaatgtcattctgcatacaagacagaatctgtcgggaaagatcggattctgaataatactcagaatgacattcaatatatgtaattagctgttattagtcaatcatctcgaatccgcaataaggaactaatgctttagggatacggataccttccggagtctgattattttctaataaggctgcaacaatacgcggcaaagccagtgcggaaccgttcaaagtatggcataattctgttttcttttcggcagaacggtaacggcatttcaggcgattagcctgatacgtatcgaaattggatacagaacttacttccagccaacgctgttgtgcttccgaatacacctcaaagtcaaagcaaagtgcagctgtaaaactcatatcaccaccgcaaaggcggagaatgcgataggggagttctaatttcttcaacaggccttctacatggtccaacatttcctgatgtgactgtttggaatgttcgggtttgtcaatgcgtaccagttctacttttgagaattcgtgcaaacggttcaacccacgtacgtctttgccgtaagatccggcttcacgacggaaacattgagtatatgcgcaattcttgataggcaattgtttttcgtccaaaatcacgtcacgatagatattggttacaggaacttctgcggttggaatcaagtacaaatcatctacttcacaatgatacatttgtccttctttgtcgggaagttgtcctgttccgtagcccgatgcggtgtttactaccgtcggtggcatgatttcttcgtaaccggaagcgcgggcttcatccaggaagaaattgattaatgcgcgttgaagacgtgcccctttacctttatatacaggaaaacctgcccctgtgattttcacgcccaggtcaaaatctatcaagtcgtattttttggcaagttcccaatggggaagcgcattcttggggagttcggtttccataccgcccattttttccaccacattgtcttcagcgcttacaccttcgggcacactgtcataaggaacattgggaatggtgtaaagcaggttggtcatgtcttcctgtgctttgtccatttctgcttgtaaagctttgctggtttctttgatttcggctacacgtgctttagctgtttcagcatcttctttcttcccttctttcatcagttgcccgatagatttggagagcgagttcacttctgccaggtttttatctaattgattctgcgtgctacgtcttttgtcattgaatgcaagcacttgttctatcgttgcttttgcatctttaaaatgcttcttttccagtccgcggattacctcttccgtattctctgtaatttgtttaatggtaagcatatcttttcagtctttttgatatttcttgaattaatggacaaagatagataaaaaaatggtaaggtgtatgagttattcgttacttttgcatccggattagaaaatgaaaagtaagaaagatgaattatcttgagatagcgggcactttaatcggtctgctttatttatggtttgaatatagggcgagcatttggttgtggccggtcagtgtcattatgcctgccatttatatagttgtttattatcaagtaggtctgtatgccgattctgttatcagtatctattatttgttggctggaatttatggttggtggatgtggttgcgccatacgccggataaaggggagaagcctgtttccggcacaccgtctaagctgctgttgcctatgtttgttgtgctgcttgtggtgtttgtgctgatagggattattctcgaaacttgtacagatagtacggtgccctggtgggatagttttacaacagcacttagtattattgccatgtggatgcttgcacataaatatgtggaacaatggttggcatggctggttgttgatgctgtttcttgtggtatctatatttacaaagatttatatttcacttcttttttgtatggactttatgcggtaatcgcttgtttcggttatttgaagtggaaacaattaatgaatttatcttatgaaagagtataaattaccgataggatgtgacgtgccggaaacaattattctggctgatggtgatttcccttcccatccgttggcactggagtggttgaggcagtgtccttatgtggtttgttgtgacggggcagcaaatacttatattcgttcaggtagaatgccggaagccattgttggcgatggcgattctttattgccggatattaaagagcgatatgcttcgttgattcatagtgaggcagagcaggaaacaaatgatttgagtaaggcatttcgcttctgcctgtcacaggagaggaagcgtattactatcatgggggctacaggaaaaagagaagatcatacaatagggaatgtcagcttgctggcggattatatggagcaggcggaggttagtatgatgactgattatggtatctttgttcccataagggaggacagtatgtttgaatcttatatcggtcagcagatttctgtttttaatatgaatagtacggctttatctgccgaagggttggcttatcctttgtctgtatttaccaattggtggcaagggactttgaatgaggcattggccaggcattttataatccggactgaaggtaaggtcttagtgttcagggtattctaaaagaaaagactcttcaaggaatgaagagtctttcaattttttttattttgtaactgattatgcttctacagccggaacaacagaaacagatcttctgtcattgcgacctactttgaaacatactgtaccatctactaaagcgaaaagagtatggtcacgtcccataccgatgttttcacccggatggaattctgtacctctctgacgaacaatgatgttacctgctttacaagcctgtccaccaaatatcttaacgcctaatctcttacttgctgattcacggccgttcttagaactacctacaccttttttatgtgccatttcttcttaaattttaaatgattaagcaataacttgtttaatagttaactctgtaaactgctggcggtgaccgttcagttttctataaccttttcttctctttttgtggaatacaagtactttgtcgccttttaccagcggagatactacttcacaaactaccttggcaccttctacagtaggagcacctacagttactgttccattgttgtctaccaacaatactttttcaaattcaacagttgcgccgttttctgcgttctgaatgtggtgtacaaacagttttttgccttcttcagctttgaactgctgaccgttaatttctacaattacgtacatctttttataatattaaacggttttctccgtaaggtggaatgcatcactgccttcacttttctacctcatcggactaaatcgggcacaaaattactatatttatttatatctgcaaagaaaaaccatcttcttttttcttgtactcaatttttttattcatattgcattttgtggatgcgcgattgtataaataaggtttgtgtgattgtacttttatttaccccattgtataatataggctatcaatacaatgatgcctataatgatagaacagactagcaacagtcccaaaaagcaataccaaaacatgattattgtacggcagaagcttttccaccaggaaagtccgaacagttggcggtaatcccagacaaataatataaagattgctttgtaacttaaatcaaaaatatcattcaaatgtgctgttccggtaaatggcaggatcagtaaagaaatccataagatttggcaggctatataaacttgtgcaaaaaagttttccgtcagatttagtctacgtccgatagaggtccggcagaagcttaaccgggtgcttattgtaaaaagagggagcagagcaaggatgctgaaggctttgttgccatgtatccaacttttcatcaggttaccgactgcagagagaaagctattttctgtgaaataattgttagtcatttcgttaaagacatttttcatttcacttccggcttcgctcaaatcattccagatatcttgatcttcatagggattatcttgttgggccatgtttgccaatatgttttttcttatttccgatatggttgagtcttgtttgttggcttctcttcctaaagtggccatccgtaagctatcttgtcttgccaaagtcgtaccaatttctttcatcagacctctccagtcatcaatctcgccgttttttgcttttattttttgtttaagctccttttttatttgtttgcttatttctttttttagctcattggggtcttgattgctggattttgcatcgatttgtgcttgtattgattctgataaactgtgagtttgggcccactgtgcactgtctgcataagtaatactttgtcctagataatatttggtacaactgtctgatgtctgttcctgttggtacttgatgtcgtccatcaggctggcgatagtaggctcttcttccatttccttttccgatagttttatcgctgccgggtcaatgagttgtacgcccatgatgtatagagcagccagaacgaacaaggtttgaaatggtttatagtaatgtacacgttttcccttcagataatcccgtatcatgtatcctggtcggtagagtagttctatcaggttacggctgaaaccatggtctatgttaaagaacccacttaaaatattctgaaaggcatttcgtatggtaaaacgtggcgtgtggcggttttgtccgcaatggggacaataatttccttgaaacgtgtttccgcagttcttacagacgcaacatgtcggattctcttttatttcatgtttccctcttatttgtttttgatggagcagtttgtagaaggctactatttttttgggaaaacaggaagaataaaagaacttttccggaaaatgtttgtctggttcgtaaggggtgaatttatgaattaatggaagtaacgaaagattgtctagtatttgccgatgtgggtagaccatcagttcttcacgggttgtcatgccattgagcacacctacgaagtctactttggctgcttgggcggtttctgcgtccactgtgctgtcaccgatgtagagtgtttcgcttttccggcgatgcagccggcgtagtgctttttttataccttggggatctggcttggcttgctttacatcctctcctccgataataatgtcaaaaaaatctttcggaaaatgttggtctaccatttcgcggatacgaaaacggaatttagtggaaatgatacctatttgggcaccttggcttttcagtgttttcagcacggtaaccgtttcaggaaaaaagaaagtgttgacagtcatgtatgtatctgcttcctttacatattcttttttatattcggctaatgtttcgggggtagtgattccgctcaaaatactgaatgaatcttccagtgtttttccaatggtgcgttttatggcttcatcactgatgcccgtatgcccatggcgttccagtacattacgaaagcagataacgatgccgcgtgaagaatcggctagtgtgtaatcaaaatcaaaaaggtatgttgtgtatttcattctttcaaattaaattcattttagtgtaatgaatatattgttcgcaaggattttgtcaaggacggcctccacttaaccagtgtttacggtaataatcttcattcaggctgctgattatgactccccggctggtactggcatggatgaacttattatttttcaaataaatacctacatgactggcaatccgtttttttctgccgttatggaagaataccaaatctccttcgcgcaagtttctcttacttactttatggcaatcttgggtacgttggtcatccgagttacgtttcaattttttgtggtatacctttttatataaatgtgaagtcagtccggaacagtccactccccgtttgctgttaccaccgccacggtaggggactcccagccatgctgctgattctacgtacagttggtgattgtctttcatgtcaatatccatattcagacggatggaggcacgcgccagttctttgtagttataacgtggggcagaggtaccgcatgaaaccaacaacatggtcagtgtacctaataccagcaaatgggatagtagttttttcattctgttacattaaaatagtcctctaattccttttcggcggaattccctttattgtcaatatctcggataatctttccgttttccagcagagcgatgcgtgggcatatatctactgtgtggttcagattatggctggataccagtatggtggctccggtttcttcattataagctttcagtaaatgcttgataatggactgcgaactagggtccagaaagttgaacggttcatctagaaccagtacctgcggttggtgcagcatagccgaaatgatacctattttctgtttgttgcctgccgaatagttacgaatcagttttttttgtccgatgacttcgccattcataaaacgttcaaacctagcgacacgtttatctacttcttcttttgttagtccgtacatttttcctacaaagtagaaatattcttcgggggtaagataatctatcaggaaaccttcgtcaatgaaagctcccgttatatttttccattcctcactccggctcacatcgatgtttccgatatgtacactgcctccgtcggctttcagcaagtccagcatcaggcggaacagggtcgtttttcctgctccgttattgcccaccagtcccaacatgtcaccgctttgaatggagtaattttctatgtctacagccactttcgggccaaagttcttttgtaattggtttattatgatattcatacgcaattcgttttaacgtgagtcacggaagccttccatattctcataacggcgcttcatgaaacggttatagatattttttatccaaatattgtgggttgcaatcagtaacaaccctataatcatcatgatgatgcaggctgtatcctgttcaaagaaagccgtcagagctttgttgataatcaagggcaggaaaaaagcacatgagatgataatggtctggaataaggaacttccccgattgcttcgcatgacattggcgtttaacgggagtgtctttttattgtacacagccagttgcagcatcatggcgaatacgaatcctgctgtaaacagcatataggatagagccatgaggaagggtatcttgcccttagctacagggatcatcataatcaggaaagggatgaacacgatgatgcagttcaggtaatacttggcacgaagcaagttatagatagattccttacggctcataagaccatccagatagttgccctcaaaagacatcacttgccccagggtcatgatacttaaaatggcaaaattgtatatgcagataaaatttatcattcctgttccgtcatacacatccgtgaaggcaatcagtgccgaaaaagccagcatgatgataaatcccatgcggaattgtgtctttacggttttgttacggaaacacagttttagttccagacgtagatattcacctacgtcaccatagcggtccaggaatttatattcggatacatgcttcatcttggtgtcttccactttggctatttcattatagatgaagtgcagctgtagcttgcgatttactagcagaagtaacagaatggctgctatgacacctagaaaggcgagtatgtttccttctataaatccttctcccaaattcatcatgaacgtggaaaccgggtttccttcgggaataaattcagctcccgctaataatccgtatactccgatcgggagaagtatataaagcagtttctcattcagtaaagttttgcatatcaaataccaataactgttcataaccatcagaagccaaatgccgcacagatagcataggatgcccgtgagtccgtagaaacggataatcgtaagcagagcaaaaggtatgatcaggaaaaaccagaagaaattgtaactgctgattccggattgtagtaacagggtatccaccagcttattcttttttaccggcataagcagatagggcttgatctcttgtgacatggccggttggagcatgaagcgtaacaggaaatcaagtatcagaagataaatcaacccttggttcataatatggtaaggttccatgctgggaaagatatcttcaaaagcaaaggacagcatgaccccgataaagatgaggtatgctgcccaaaaagcgaccataaagtaaattaaaaacttggcgaagcggttcctgtcaaatgcaggattccgcttggccgcaagtttttgattctgtcttataatagatagaagcataggcttggattattttgtttcttccgaggtcatgcttacttctacacggttattctgctccaacaaggctttggtaaattcttgcagatctttagcggtaatgctgtttacggtatttgtgtagccggtgttcatatctgtcccttcccagaaatattcacccagtatatttacccaataactgttttctttggcattttccttgtatttcttcagcatgaattcttttaccttgttcaaattttcggcagacggtccttggtcgacaaactgattcagttcattcaaaatgatatccgtcattttggcacgtttggcaggatcggtatcgaaatagatttgcagaaccgctttctcttttggatatttggtcagactgccgaatgcgcttactccgtacgtaccgccttctttttcacgcacactttcggtatacatgatattcagtatctgtgaaagcatactcatcatgatttggtttttcagagtatatgcacatttaccattgttgataaccagtacagaggctttgggcgtttccagttttttgctgaaaatgttcttatagtcgccttggcgcatatcaatgtgattgtcacggaaggtttccttgcggttgacagaaggcaaagctcccagataagttgcaattaacggctctacttcttccggtttgatgtttcctacaaagatgaaagtaaagtcgctggcgtctttgaaacggtctttgtacatctccataactttggcatagtcaatcttgtccaccatatcggctttcatacggatagtacgcggatgtcccatatagagggctttttgcaacgtatcctgtaaggcagtcatggggttggcctcttgatttgccaaagatgcttgcagacggttcttgaatgaggtgaatgcatcattgtccattcgtggagccgtgaatgataaatagactaattgcatcaaggtttcaaaatctttgggtgagcagcttccgctcagcccctctgtattgccaccgacagaagcacttacactcgcttttttacctgccaatactttctccagatcaacattgctgaagttacccaaaccgccgatacttgccacatcattcatgacattgatattgataatttcatcattcgggaacaaggaactgccacccggactgaaagctctcattctgatttcatccgctttgaaatcggtcgactttaagataacgcgtactccattggatagagtcaggatagtagaaccgaacggaccattttcctgttttgtaatctttccaccttggggcttttcagaaatcaaaggttcatcagaaactttgtcttcataagcagtcagtgtttcagcttttactttattgacagcagccaaaatttcttccttggatggaactttcaatccttccttttctgggaagaatacatttactaccagattgctgtcggtaaccaaggccgggatcagactgtttaccatttccacagacaggttggggacgatctgattcataatggcatattcattttcaatacctggaatcggttcgttgtcaatgaagtggcgtacatattcatccacgtatgcaccgtttttcactttattgcgttcgttgtatgcagattccagcatacgcagataatccgctttggcgcgggcatattcggacgcggtgaaaccaaatttatggacccgttcaatttcgcgtacaatggcggttattgcactgtcaattccatcttccttgcttgctactattcctgtaaaggcatcttttgttttggaaatcaggaattcttggtcgctgacttgagcgaagatgaaaggaggattggctgtttgggtcagttcgttcagacgggcgttcaacatattttctatcatggatttcatgtagttcactaccagataatccatgtttcccttttgttcattaggaatagcttcatgtttgtagcataaataagctactgggtttgcctgttctttatctgtttctattgctacaatagtttccttattgtcgggaacttggaagtattctcgttctgccgggttgtctggcattttaataggagagaatatcttcttaatctttgcctcaatcttgtctacatctatatcgcctactacgacaataccctgttggtccggacgataccatttttcataataatcgcgtaatgcctgataagggaaattgtctactacttccataatgccgatgggaagcctataggcatatttactttccggataaagggtagggagggctttttcgtacatacgcatcatagcgtttgtgctggtacgccattcctcatgaatcacaccgcgttcgctgtctatttccttaggatccagtgtcaggtcgtcggcccagtcatgcaaaatcagcaaacaagaatctacaacgccgtcacgtatcacgggaacattggaaatattgtatacggtttcatctatgctggtataagcattcaggttttcaccgaatttcacccctatgctttccagatattggatgagggttttgtcgggaaagtttttagtcccgttaaagcacatgtgttctaagaagtgtgccaagcctcgctggttgtcttcttccaaaatggaacctactttttgagcgatgtagaaatcggctcttttttccgggagttcgttgtgacggatgtaataagtcaatccgttgtccaatttaccgatgcgaacgttagggtccgtcgggatgggaggcatttgctgttgtgcaaagcccaccgacacgctgcctagaataatccaggcagctgccatcttccttagaaaatgtgtcatagtgtttgttgtggggttagtttgtttttattataataagtcgttggcagataggtatctttctgcttctatggcagccttgcagccacttccggcagcagtgatagcctgacgataatgcgggtcggccacatcaccggcagcgaacacaccgggaaccttcgtacgcggagtacctgcttctgttataatgtagcctacttcgtctgtgtccaaataatccttgaaaatgtctgaattgggtttatggccgatagccagaaagaatccgtcaataggcaagtcataacgttcttcgttgcattcaccctgacgctttaccaaatgaacaccttctacgccattctctccgtataagccgacagcgttgtgttcgaacagtaccttgatgttaggatggttcataacacgtgcctgcataatcttggatgcgcgtaagaacggtttgcgtacaatcaggtaaacctgtttggccagtcctgccagatagacagcctcctcgcaagcagtgtcaccgccacctactacagctacggttttcttgcgatagaagaaaccgtcgcaggtggcgcaggcgcttacacccattccggcatatttctgttcgtcttccagacctagatatttggcggtggcacctgtggatataattacagtttctgcctcaatcactttttcgtcatcaatggtgatacggtaaggacgtttgctcaggtcggcggaggttgcaatgccattgcggatatccgcgccgaagcgttctgcttgtttgcgcaagtcctccatcagttgggtaccgctgataccttcgggatatccggggaaattttccacctcggtagtgatggtcaactggcctccgggctgtagaccttcatataagaccggggcgatgttggcacgtcctgtataaatggcggcggtgtagccggcaggacctgagccgatgataaggcatttaactttttctgtactcataatacttatttctttacttaatttaatttgatgaatattatattatctctctatcttgaactctgcttgttatcgtaagtctatcacttcggcatttgggaatttctttttatcaaacttgaatgtcgcattgtccagcggctggttggtttggtaagaagtgacgataatctcatttgccgatttattactttgttctacctttatatataaaggctgatatgtttgggaaacgaacaaggtgatggatgtgatatcctgtttattctccggagtcagtatcacttcaaacccctgtttgccgttacggcttttgatccctgtatacttataattatatccgcttttgtaaatggataacagtgcataaggattgatggtttgcaactcttccggggtaggattgctcacattcacttcttcgctgctttccagataactccattgcgttgttccgtcaaaccagctttgtattccgccactgttcagatagaaccggttgccttttagcaataaggttccattgcttgtccctccaaaggtggcacggatgcctccggcctgttgcagggcattggcggttttgtccaatatctcccgtgcctgtttgtccttttgtgcggataggctgactgaaaggaaaaggattaataccagtaaatatgttcttttcatttttatcataacattattaaacaacttattgttgcagattgttcaatttcatttccaggtctgtttcatccatgcagagtacgtcacgcgccttgcttccttgagtggggccaacaattccagctttttccagttggtccatgatacgtcccgcacggttatagccgatagagaacttgcgttggattaatgaggtagagccttgctggtgaatcacgaccagtctggctgcatcttcaaacatagggtctaaccggttcatgtctacttcgccaacgctgctttcactctcttcgcctacatattcgggcaacatgaatgcggtggtgtatccttgttgtttactgatgtaattggctattttttccacttcaggagtatccacgaatgcacattgcacacgtaccggatcattaccttgcaagtaaagcatatctcccttaccaatcagctgttgtgctcccgaacggtccagaatagtacgtgagtccatcatggcagctacacggaaggcaacacgtgccgggaagttagctttgatagtaccggtaataatgttcgttgtcggacgctgggtcgcgataatggcatgtatgcctactgcacgtgccaactgggcgatacggcagataggtaattccacttccttacccgcagtcataatcaggtcaccgaactcatcaatgataatcactatgtaaggcatgaagcggtgtcctttttccggattcaactgccggttgatgaatttcgcgttatattccttaatattacggcaaccggctttacgcagcaagtcgtatcggctgtccatctctatacatagtgagttcaaggtttgtaccactttggtaacatcggtgataatcgcgtcttctccatccggcagcttggccagaaaatgcttctcaatcggagcatagatagcgaactccaccttcttggggtctacaattacaaacttaagttctgccggatgcttcttatataataaagaggtcacgatggcattcaatcctacggacttaccctgtccggtagcgccggctaccaacatgtggggggcttttgccaagtccaccataaagacttcgttcgtaatggtcttgcctaatgccacaggcagctcataggtggtttcttggaactttttgctgttcaggatggatttcatcggtacaatgcgcggattggcattcggaacctcaataccgatagtgcctttgcccggtatcggagcaatgatgcggatacccagtgccgacaaacttaatgcgatatcatcctccaagttcctgattttagagatacgtaccccctctgccggagtaatttcgtataatgtgatggtaggacctacacttgccttgatggaactgatttcaataccgaagctacgtaaaaccttgatgatgcggtctttgttggcgttttgctcttccatgtcaatattaggaccatcatcttcatattcatttagcaaatccagactagggaatttgtagttttccaaatccagacgagggttgtatggtggaagtacgggacctttgtacgcctcgtcttcttcatttgtttcttcactgattgaaaaatcaggttcatctgtattttcaacttcctcttcttcgtttgtgtaggcaggttcttctatcactgccggttcggtaacctgcttgctctcaaaagggaagggcacttgttcttccacttcctcttctttctttgtcggttgttctaattcgaaatctacgatagcaggaccgggattagagaattctttcctggattcttccttccggggagcttctttaatcggattttcttcagtcgcagaaattgtttgatcctcttttttctttcgtctgaagctgggacgcagtgctttacggataaccagtatggtttcgttacttaaatagataaagaacaatagtgccgctatgaacagcaataatcccaaacctggaatcccaatttgtgaaatcagccaattgcttacattatgtccgtgcaatccccccggatagataaaactatccccaaaggtgccgtcaaaaataaatcccaatgtgatagagaaccagatgagcaggatagaacaggacataaaccatttccagatacggaactggtaagctttcattaatttcatacccactacggccaggaataaaatgataaaataagcagctaagccgaaacattcgtttataaggaattcggcaagttgtgcaccgcgtgctccggcgtaattttttacatgattggcggtttgcatcagttcacccggctgctgattatccaaaatactttggtcggcggcccccgtaaagaagaaagaggtaaatgccagtaacagataaactgcaaaaattacactgatcaatccgattacaaaatgtgtggtttcgttctttaaaaaagcggagaatcgtttggtagatacctttttaggctctgtctccttatctgattttttctttgccataggtcttcgttctatttattatttcgcaaatgtacatgaaaaacattaattattgccttatttaatctcttttttcttaactttgcgattcaattttaatgtttatggaaaagtacagtcaggtgatatttgacaaaaatacagtagagtttgtaacggtagccgccgaattttgtggctttctggaacgtgcccgtgatatgaaatgctatgactttgtagataccgccttaaaaatacttccgttgctttatttgaaagcgactttgttgcctccgtgtgagccgataggagaggacgaacccgaaaccttcgttactgaagaagattatgaactgatacgtagggctatagccggtgtgttaggagccaaggatgattatctggaagtgttcttgccggatatggtgtacagtgacacgcccatcaaaaaatgtatttcagaggatttggcagatatctatcaggatttgaaggactttatcagtgtgttccaactgggactgaatgagacgatgaacgattctttagtggtctgcaaggaacatttcagagagttttggggacaacggctggtaaacactatgcgtgctttgcatgatgtgaagtacagccctgccgatgatggcgaggaggaagaaatggaagatgagaattcattattatgaaacaaataaggaaaacgattactaaagccgagatagcagcaatgcccaaggtgctttttccgggacgcatcttcgtgatttataccgagagtgaggccgaaaaagcggtagcctatttgaaagatcaacgcatagtgggagtggatacggaaacacgcccttcttttaaacgcggtactacccataaggtagctttgttgcaaatatctacgcaagatacctgtttcttgtttcgcctgaaccggataggtatgcctgattctctgcaagagtttttgatgagcgataccttgaagataggtttgtctctgaaagacgattttaactcgttgcggaagcgtgaggatgtgcatcccgaccggggaaactggatagagttacaggactatgtaggacgattcggcatagctgaccggagtctgcaaaaaatcttcgccaatttgtttggccagaagatttcaaaaagccagcgtctttccaattgggaggcggaggtgctcagcgagggacagaaactatatgcagccacggatgcgtgggcttgtgtggaaatttacaattgcctgacggaattggaacgtacgggcggttatgagataacagaggaagaaccaatagaaacaacagtaaatacaaatggcttataagaaagtatacctgaaaccgggtaaggaagagtcgttaaagcgttttcatccgtgggtattctccggagctatccagcgcattgagggagaacccgaagaaggcgagatagtggatgtgtacacttcgaagaaagagtttatagcttgcgggcatttccagataggaagtattgccgtgcgcgtgctctctttcaaggaaggtgagattgatcatgaattttggaagcataaactggaagtggcatacgatttgcgccgcagtttgggtttggccggtaatcctgcaaacaatacttaccgtctggttcatggcgaaggagacaacttgccgggcttgattattgatgtatatgatcatacagctgtgatgcaggcacattcggccggaatgcatgtttaccgtatggagatagccgatgccttgtccgaggtgatgggggatgtagtccggaacatttattataaatcagaaaccacattgcctttcaaggcggatttgggaccggagaatggttttatcaaggggggaagctccgaaaacatagcgatggaatacggcttgaaattccatgtggattggctgaaaggtcagaaaacaggcttttttgtggatcagcgtgagaaccgccatttgttggagcgttatgccaaagggcgtaatgtattgaatatgttctgctatacaggaggcttctctttctatgccatgcgtggaggcgcgaatctggtacattcggtagacagttcggcaaaagctattgatcttaccaatatgaacgtggaattaaattttccgggtgatacccgtcataaggcgtatgctgaggatgcttttaaatacctggatcgtatgggggatcaatatgatttgataattcttgaccctcctgcatttgccaaacacaaggatgctctccgcaatgcattgcgcggctatacgaaattgaacgctaaagcatttgagaaaatcaaaccgggaggcattctgtttactttctcttgttcgcaggtggtggataaggtgaatttccgtaatgcggtatttacagctgccgcacaaagcggacgtagtgtgcgtattctgcatcaattgacccagccgggagatcatcccgtaaatatttaccatcctgaaggagagtatttgaaagggctggtgctgtatgtggaataatttgattcgtttgtataatcatatgtagtacaaaggcgtttttacagaatttgaaactgtaaaagcgcctttaaaatttaaatgatgttaattgaaagcaaataattgtagtgttgttatgtttgataacataaaactatttatctttgcactgtgtttttcatggtattagatttaaggttaatgaagattgggtgtctgggatagatacccttctttttttatatatgatataggccgtttttttaggcttcttcttcctgaaaaagagatttgctctgttttttctttcacttcttacattttctcttttggggtgacagccctctgttggttcttcttcaatgctggcggcatagttcgttctgcctgggtttaaagctttatatacgctctcctaagtcttttcgggctgatgattaaggggatttgtatgcttatgtagtacagactccggcagtggactgtacagtcgcctatagtagactgtatagtctattccaatcgtctgtacagtccactgccggagtctgtattaggtggctggaagaaaaagcttaatgtaacagaagaaaatgcttagatgacgggttataacatcttggtaattatagtgttggtataaacatgaaagtagtataaatgggttgcctcaatcatgaagctcacggtggcgcgttatatagaaacaggaggtgctgaagtaatttctgatatattttaactgtgccagtacaggatataattttcgtggccgcagatggaacttttgttggtagtgtgggttgatgaaccataattgtctgtcggttatttcgtatccatacttttcagcaagttgttcaaaggtgtctatggtcatgcggcagcgtttgatgtctgataattcttcaatacatgatggtgtttcatggaaacatctgagcagaaaccgatagagtataccgggacataaatgaatgaaagggagagaggagacgaaccggttgtggcaaatttgctgatgtccgccaaatggcatttgccaagacgggaatccccagaatatgatgcctctcttagctagaagaggagagaggcaacggaagaattcttctttgttactgatgtgttcaataacatcgtgtatcaggatgagttggtaacgggaagctgaggaaaagttgaagaaatccgttgtggtgaattctcctttgtagccggaggcggtgaagaaggtttctgcctggtgtatgcgactggctgcacggtctattcctgttaccttgcagcctagttcggcaaagggaagcaggttgcctccttctccgcaacctatttccagtatgtgggtggaagggctgagggagataaattgtttcacatagtctatatagaaactacgggacgtattcgccagctcgttaaaataacattgtctgtctttatgtcttttttgcatggttgtttttttatcttatagatacaaggatggacaaaagactgcatgaagtttccttaataattccagcgcacccccaattgcaggttgaaatggagcgggtgtttgtcacgtatggtgtttttaaagctgccgtccttgaaataaaaagctgctccgggctctatgaaagcacctagggtgggatttatattatattgtattcccaatgcggcgtgtatggagaattggaacggttttattttcagattctctgtactggaatagattttctctttctgaacgatgaaatcttgttccagtttacccgaaacggatttgtctattgtgcctcctcctgtggcataaaaggaaaaggtgcgggtggtataaagccggcggtctaatttcacggacaagcctatgtagtggagcttttgtcgtttaacccacttggaatcttctcctatggaactttcggacgacagataggtgtattgcagtcccgcgctgaccccccagtgcctgcttatagatttacggagcgaaagctcaatgctgacggggagattataatgggtatattctgtcatgggccgtcccgtgttgtcatttgctatttgtagtagagcttcgtaagcttgtgcatcgggaaagtccgatggatattcctgcaaatagtctttgaagtcactccaatacataatttcatccttatgagaactccctatgtctccccgggaaaaagttttgtttatgaagccggtacttgctccgttattgccggcagatatggcaagtgccaaagtatatccggaacgcttatacggtaatgcaaagtgcttgtgtccggaagggcgcttgtgtacagattctgtatcccggattgtatcttgtaccgggggcatacattctgtttctatattatttgccgtatcggtgtggatacttgtttggattggcggtcttgtcaaggaagctgtctttgatttggtcctgtcctgtaacagtttgttttcaggcataatggaagggctgcctgtaatgcttcttggctggcatgccggtaaggatacaacaggtgaggctgcttcatgtttttctgtctgtaaaaaataaaaagtagtggcaaaaggtatgaatatcaagaagaaaacggctgctatacgcatcgttttcatccttcttctcttatgtagatagggagtgaaaaattccgtttgaaaatgattccaatcattttctgggagtggcttttcgtattcgttaacccgttgtttcaagtggtctatccacggttcttcttcctgtttcataatgattgtcgagttaagtattctttaattttctgagcaagtatacatttggcgcggtacagttgtgaggaggatgaatgttcgttaatgcctaatgtcttcgcaatctccttatgaggcatttcctcgaatacggccaagttcagtatggtgcgatagcctgtcggtaattcagctatgaatttcatcagggtttcaataggaattgaaatcatatcttcttcgtccacaggttgcatgttttcttccaggtcatctacagaaaggaaagagctgtttttctgtttgcggagatggtgcaaggaggtggttaccatgatacgggtgatccaggatctgaatccatgcaggtcggtggcatgtagctggccgatggcggaaaatactttgacgaatccatcgtgcatgacgtccagtgccgaatcttcgcctacatagcgatagcacactccatacatttggcgggagaagagcctgtatatggtttccaaagcttcccgctttccggctttacatccctctattagttctgtgtcattcattcttcttttgtcatgttattatatgaagatacaggagagggtaaaagactgcatggaaacagaagtttttctgaaaataaatgtaaaaagaagataattgtctgcatttgttaggttaaaacaaaacagatgaaaaatatgagaatacaactttatgcaacactggcttgctttcttttaactttggtcacaacttacgggcagggctgaaaaccttatgtggaagcagggatgaatgattgtatggcgaacgtttcattgtttataatccgtactgcatatggttcggaagcggaaaagataaatctgcttgcaggattgttgcagaaggcaggattacaaggcgagattaaggttgcctgtggagtggaagcactaggtcgtttgtttgggcttaagcgttatcagtcagttgtttatggattttctatcagcggggcagacaggaatatcagcctgtcaatacgctggatggtaaaaagatggttttgaaagagaggaagcgacagggtaaaaattggttgaaatggttgaaaagttggtcatcctttgaaaaagggaaggccggcttttcttattttccatcggaggatttacatttgtggtatttaaaacctataaaatgaatgatatgaaaggaaaacagggtatggtttgtatgggcttgttgctggtgctctcttcttgtcacaccggtaagcaaatcacagcttctggattacagcggaaggattttcaaacagaagtgaatggacagcataccgatttatttacattgagcaacaagcagggaatggaggtctgtatcacaaactatggggcacgggtggtttctatccttgtccccgacagaaatggaaaacgggaggatgtggtgtgcggattttccacgattactgaatatatggagcaacggcagaattttggttctacggtggggcgttatataggacgtattctgaatgcgcgtttcacgctggatggagtagagtataagctggtccctaacaatgggaagtccgggcatatatcacatggagggaatcccggctttgccgatagaatatggaaagtggagcaggcagatacacatagggtccgtctgtcttatctttctcctgatggagaaaatggtttccccggaaacctgaaagtgacgttggtctatagtcttggtgaggatgataatgcgttggatttgacatacgaggcaactacggatgcacccacggtacttaatctttcccatcattctttttttaatatttcgggaaattttacgaaaagcgtggaggaccagcaactttgggtagacgcagatcgttttactccatacgatgataagaaatgtgttacaggagaatatcttcaggtggccggtactccccttgattttcgtatgccgcatgctatcggagaatgtatagatgcggatcatccccaattgaaggtggtaaacggatatgatcatacttgggaattgaatacgaaaggagatgatacaaggccggctgcctgggtgtatgatccagcaagcgggcgtaagatggagatcttcaccaccgagccgggaatgcaaatttataccggtaatggactgaaaggaaaaatgacaggtaaaaggggaatagcttatcctttccgttcggcggtatgtttcgaaacgatgcattttcaagatagccccaaccagcccggatttcctagtactgtactccgtccgggagaggtctttcgtagtcatacggtttataagtttgaataattggtgcatccgtcaactggctgatgtgccaattagcggtgctatatatgcccatacggttattggtatattggtaaattgacatgtcagcaaatttttttttcattttgatgtaacgtttccctacctctatgtgtcatactggtgaacatggaacaaaatagatttgaaatagaggcaaaacgaatgcggccggctttgttaagaatggctatccgttatttggaagactccgacgaggcagaagatgcagtgcaagatgcactgttgaaactttggtttcttcgtgaccgtctggaccaataccgcagcgtggatgcattggctattgttataaccaagcatttgtgcatcaaccgtctgcgaggcactcggatagagaaagtcgatttggagcagggcatcagcattggtggaggtgaaaatcctgaaatgaaactggtagaggaagagaatatgcaggagatactggaagtaataggtactttgcctgacttgcaacagtctattctccgcatgaagcacctggaaggtttcgaagtagaggagatagcccgtctcacaggaagtacgccggtggcggtacgaaccaatttgtcgagagctagaaaaagagtaaaagaacaatttatgatacacagtaaggtatggaattagataagaggaatatagaagaatacattaaccgtttcctggaaggggagaccacgaatgccgaggagcaggctatttatcgcttcttccatacaggggatgtaccttctcatctgatgggatatgctccgatgtttgcctggtatgagggaggtatgcagggagaaccgggtatgtcgcagccagacggtcaggaggaggttgccggagggaagagatcgggaaagataccggtggttggaaaagaaggcttttatcagcgtattccggtagctgtctggagtgccggtatagcggcaatgatggtcattgtgctggggttaggcttgattttctattcggagaaccaagcaggcggaagtggtgaatggtcgtgctacgaaggtagttatgtggaagtgggaggcaagcgaatttcggatgtgaaacagattatgccttgtattattgaaacactggaagaggcggaacgggtggagaaactggctcaggagcgtgtggaggaaatttgtcgttccgagaaagagatagaagaaaaggaattattggtaagcgaataaaaaacataaaaaaaataagatatgaaaacaagatttattttaggaagtgcattggcggctgttttgctgatgtggggtggaacaggtaaggttatggcccagaagaatattgataaaatggcggcggaactggaaaaacgggatgatgtggctatcaactctgtaacgaaacgtgaccctaaaacccgcaaagtggtgaaggtggtgaaaagtttctcgttaaaggatgagaatataggcgcaaggttgattgaggctttcgagaaggatgaggaatatgccgaaactgccatcaaggatatgccgaagggaagaggcaaggcgcagaaagcgaattttacgttcatttataagacggataatgagaaacgtacttacacccttaatgtcaaagaaagcggaagtgtaagcatgaccgtcattatcagtccgatgaaggatgggcaagaagtgtgttctgttgtccttgactcggaatattgggattcgttcaatgagcagatggccgaattagggaataatctaagggattccggtatagaggtgcgccaaatgagtcgggaagagatggagaagatgcaggaaactatccgccagtcattgaaaggactggatgcttatgccatagctgaatagatgatggcattatttttcacgaacacaagataataaaacactctcttttagttagattacaaaaactttttaattgtcttgcctttccggaagttgtgaaactgccggaaaggctttgttttttaagatgaatctccatgaaaaatcgaattgttttatatctttgcaagtaatataaaaaacacacattaaagaagaaagatgaaaaacgaaattaccggaatgaaactcagactgatagtcatgaacttcttgcagtttgccgtatggggggcttatcttacttccatggggacgtatttgtttaatattggcttgggggccaagataggtctgttttacgccatgcaggggattgtttccttgtttatgcctgccataatgggaattattgccgacaggtgggtgcctgctcaaaaattatatggtttctgtcattttatggctgccgtgtttatggtggctgccgggtggtatggctatgtggatggtgaagcggttaatttcggtactttgtttacattttattctcttagtgtagctttttatatgccaacattggctttgacaaattcggtagcctataccgcactggataaagtaaaactggaccctgtcatcgcttttcctcccatccgtattttcggaacgattggtttcatctgctccatgttgctgacggatatcttgggattccaaaataattatatgcagtttttttcttgtgcttgctttggagtgatactggcggtttatgcgcttactttgcctgagtgtcctgtaagtcgtggtggagaacagaaatcgttggtagatgctatgggattgcgggcgtttacactgttcaaacagaaaaagatggctattttctttatattttctatgttgttgggggtttctttacagataaccaacggttttgccaatccgtttctcagcagcttcaagggagttccggagtatgccgatacgtttggagtgaatcatgccaatgcattgatatctttgtcgcaggtgtcggaaacattgtgtatcttattaataccgtttgtgttgaagcatttcggaatcaagcgtgttatgctgatagccatgttggcatgggtacttcgtttcggattgttcggactggggaatcctgggccgggtgtctggatgtttgtactgtccatgattgtgtatggggtggctttcgacttcttcaacatttctggttcgttgtttgttaacaatgaaactgatttatccatccgttccagtgctcagggattgttcgtgattatgacaaatggtattggtgctacggtgggaacgttgggagctcaggcagtggtaaatcgttttgttgatatgaacagcagtgctccgcagatggagggatggagcatgacatggtttgtctttgcgggatatgccttggcggttgcggtattgtttgctgtcatattcaagtataagcatcgtcccgggcaagtttgataaattattttttgaccgtttccgatgtagacgggaatggtggaaggaaagttaaattatggatgaaatagaattgaaggtacatgatatgtcctctacattgcagccggcggatgcatatgcgttggtgttggaagaagtgaacggcaaccgtaagctgcctattattatcggttcgttggaggcgcaggctattaaggtggtaatgatgggctataagatgcccagaccattgacgcacgatctttttctgacggtgaccaaagagttggggactgctttaaagaaagtattgatatataaggtaaaggatggagtctattattcctatctgtttttggaaaaggaaggtgaggtatttaaaatagactcacgtacttccgatgcgattgcgttggctatgcgttgcgggtgtcctgtctatactactgatgagattatggaaagtgagcaattgcatgaagttgggaatacggcattttctgtcaatgtaaatacagttgatgtggtgatgctgaaagaagcattgtcaaaggctatagaagaagagaattatgagcaggcatcccgtttgcgtgatgagataaaacgacgggaacaagaggaggagaatacaatagcttgatatataaattgaaaaaacaagaagaactatgcatgttttttatacccctgatatagcgagtaaccttgagcttccggaagaggaagcaggacattgtttacgggttttgcgcctttccataggcgatgagattatgttgaccgatgggaaaggttgtttttacaaagctgtaatcagtgctgcaagcggtaaacgttgccaagtgaaggtaacggaaacgattccgcaggaaaaagggtggaacggctggttgcatattgccatggctcccactaaaaatatggatcgtactgaatggtttacagagaaagcgactgaaataggctttgatgaactgtctttcctgaactgccgttattccgaacggaaagtaatcaagaaggaacgtattgaaaagattctggtatcggcagtgaaacaatcgttgaaggcgactatgccggtgctgaatgaaatgacggactttaataagtttgtttcacgggattttaaagggcagaagttcatcgcccattgctatgaaggggaaaaacctttgttgaaagatatattgcgttccggagaagatgctttggtgatgataggtccggaaggagattttagcgaggaagaagtggctaaggctatagcggcgggttttcagcctgtcagtttgggaaagtcccgtcttcgcacggaaacagctgcattggtagcctgtcatacgctgaatttattaaaccaaaaataagaatatgagaaaaggtatttggggatttgcactcgtagcgatagtgctgcttatggcttcttgttcgtctgaaagtgagtatgccaacgctattcctaaggatgcggcaatggttatgtcattcgatttcaagacgatggcggagaagagcggcataaacggtaaaggaggagaaaaggttgtggccaaactgacggacgcattgaaaagcggtttggagggtgaagcttacaagactgccgagaagattattcaaaatccgtctgaatcgggcttgtcttttaccgataaggtgtatatgttcatcactcctcattctaatgcttttgctttattggcgaaagtggatgatgaaggtaaagtggaagctttgctggaggcattaaagaatgagcagatatgtacggagttgaaaagtgaaagcggatgtacatggacacagatgggtacggcgctgtgcgcttttaataaggggactttcttattgatgggtagtaataaaggagatgccctcagtttgaaaggaagtttgctttcattgatgcgtcaggatgctgaaaacagctacgtaaagactacagactttggtaagttggcttcggcaaaaggtgaagtcgttacagtgatgaatatgtcgttcattcctaatgatattaccatgcagatgcgtatgggaatgcccgccgatttgaaactggaagatatcaaatatctggtttccgctactttcgaaaaaggcaaaattgtagtggacgtggagactttgattgaaaacaaggatttgattgctatgtatgaaaaacagtcggctgcttcctcatgtattaaaggagcctgtttagagtatttccctgccaatacgttggtttgggcaggaggtaatatcaatggaaagggtatttatgatttgctttgcgaaaatcctaccatcaggcaagcgttggataatccgatgttaccaatagatattgaaggtatattctcttctattcatggagatgttgcggttggctataattccttgtcgaataatgacttgctgatttatgctgatgtaacgaataaagactttttgcagtccttcgaagacctgaaacctttgttggctatgaccggtgggcagatgcagttgaactctacgggtaaagaccaatacgagttccgtatgtatcgccaaagcatttggtttggtgtgaaggacaatctgctttatatctcgaataatgaaagactggcagatgaggcaggccgccgttacggagtttctttgcagaatactccttgggccggacaggtgacaaagaaccgtttctttatggcgttcaatgcggcgcagttggtgaaggatgttcaggagaatccccggttaagccgtatgctgggcagcgatgccgccatgttcaatgccatcctgggaccttgcgactatatggatgtgatggctcccgattggaaaagcgcccaaatgaatattgttatgaaagataaagaggtcaacgtgctacagttgattgtacgtggattggagaatttatgaacactatagaattacaacagaccctccctgccgtttttgcagggagggattctattatatctgatgtctggcatcagtcgttgactctgaagcgtggagaagcttatttggtggaggcagcgtccggtacaggaaagtcatcgctttgcagctacatatacggataccgtaacgactatcaaggtatcatctgttttgacgggaaaaatatccgtacgctttcggtgcgcgactgggtggagattcggaaatgttccatcagtatgttgtttcaggaattacgtttgtttacagaactgacagcgtgggagaatgtgcagttgaagaattcgctgaccggatttaaatctaagaaagaaatcaaggcttggtttgaacagttcggcattgccgataaatgggatacgccaatagctaaaatgtctttcggacaacagcagcgtgttgcgttggtccgcgccctttgccaaccttttgattttatttttctggatgaacctatcagccatctggatgaggagaatggacggattatgtcccggatattggtggaggaagcggatagacagggggcaggtatcattgtgacctctatcggcaagcatttggagttgaactacacaaaaacgttgaagctatgaggttggtctggaaattattacgtcagcatatcagcttttcacaattggcgggttttttctttgccaatctgtgcggtatggtcattgtgttgctgagtgttcagttttataaagatgtgttgccggtttttacagaaggtgacagtttcatgaagaaagactatgtgatagtaagcaagaaagtgagcacattgggttcttttgtcggtaaaagcaagactttttccgaacaagacattgctgaaatcagcgaacagccgtttaccaaaggggtaggggcttttatcccttcccaatttaaagtgtcggcaggcatggggatggagaacgtgggattgcatatgtctacagccatgttctttgagtctgttcccgatgagtatgtggatgtgaacctggataaatgggagtttgatgaatatgaacgggtcgttcctattatcatcccccgtaattatctgaatctgtataacttcggttttgcacaaagccggagcctgccgcaattgtcggaaggggtgatgggtatggttaatttggatatacgtattaccggtgtggggcgtacggaaaactttaaaggaaaaatagttggtttctctaatcgtctgaatacgattcttgttccggaaacatttatgacgtgggccaacaatgagtttgccccggggcagaaaagcgaaccgtcacgactgattgttgaagtgaacaatcctacggacgaccgtattgccaggttctttaaagacaagggatatgatacggaagatgacaagttggatgcgggaaagactacctggttcttgaaagtgattataggaattgtgctttctgtaggtttgcttatcagtgtgctctctttctatattttgatgctcagtatttatttgttgctgcaaaagaatacatccaagttagagaatctgttattgataggttacagtccggctaaggtggcgctcccttatcaaatgctgacattggcactcaatgctgtggtgctgtttttatcagtgggaattgtgatttatgtgcggagtaactatatggatatgataggaaagttattcccacaattggaagaaggaaatttaggaccggccttggttataggtgttttgctttttgtgggtgtatccttatttaatatagtagcggtacgtcgtaaagtggcatctatatggatgcataaaggttgataatagttatggtatctcagacagaatttacgcttcgtccccgtaccaggggatttcacctgattactgatgaagtggtgcgcaatttgccgccacttccccaaacaggtttgctttatttgttcatcaaacatactagtgcggcattaagtatcaatgaaaatgccgatccggatgtccgtacggatatggaatctatttttaatcatttgataaaggaacgtgagccttattacgaacatactttagaaggttgggatgacatgcctgctcatgcaaaagcaacaattataggcgtcagcctcactattcctattacagaaggtcggttgaatatgggtatttggcagggaatttacctttgtgagttccgcaaccatggaggtggtcgtaaaattgtagctactgtaataggggaataactttttcagatgttcatccgggttattatttatttaaaaaaatagattaattccactttaatcagaactctttttttaactttgtaccaattcttgaaaacagatgaaaattcatttgaaaacaagaaggaacatatataattaagagcgtttaaaatattaccttgtcttagaaaatccccaattttcaaagctgcacaagtgtaatacaacaagcgctcacgtcttgtgtttatactccttaacaggattagtatattcataaagacgtgggacactgttgttattatttgtgcagctggtatggggatacctctaaggcagataaaatattaagcaggtcccacgtctcttttttatgtctgtaccataaaaatgaacggataaaactagcctgagtgatgaaaattattgtttggaattcgcaggataaatgtgtggctgattatcataaattgataagaggctgcgatgtgttgtgcctgttggattgcgggcaatggacggttccggtgtatgcacttcagatacagaatggtctgtttcactggaaagatgagcatgaaggcctttcctatgatatattttattgcttggagaaggtggcgtttatatgtcgggatggtttgtacagcggagaatctgttctatatagcattcattccaatataggatctttggtaggtattcgtttgcaggatgatttttggctgtttgccaaccatgagtctaatcggagcaatgcctgtcatataggtgagttttatttgcgtgaaatctcagatcgtttcagaaaggcagcttttgtagccgattttaaggaaaagtcttattcttgggcacaggaaacgataggtggattatattgtattgctcctcccaaaggataccatccgcataccatcaattatttatttaccattcatgtggcctgtacggatttctatttgttggaaggctatagtagggcttccaatcagcctactttctttaaattggaaatttaatatgttccggattgtaatttttcactttttcctttgataataaaagaattagtgtatatttgcacatgaacagtaacattttataaggaatttacgttatgggcagagaacttatatttgaccggttttcgcagcaggctcttcagaccttgcaccggtatcgtgccgttatgttcagtcctacgatgctcatgtctttggttgtttacctatgatttttttatccttaattcttacacattaacatgagtttactatggacaacagaccgactatcgctgaagtacaagaatgggtactgaagctttataacacgtgtgaacaaaccatcactagtgaggaacgtaaagaacagcataaatatgccgttatggtacaacggccacaggacaaaaagttcctggtgaagatgctggacgaatcttctcaaattcgtgatcgtaagaaattggcagaacgtatcaagaagctgatagaccgttatggtgtacctgagttcttgaataagcgtgatgctttcctttttaaaatgtaccaggcttttggccaccattttgattttattgccataccaatcataaagaagcgccttcgtatggatacttctaaagtgattctggatgaggcgcgtcctaaattaacagcccatctggctgcccgttttaagcaaaagattggtcagaatgtaaatttgctgggtgaggtcgtattaggaaacggagaagcagaccatcgttatttccattatttagaagctttggaggctcccgatatcaattatatctccgtgaaaatatcgggtatctacgcacagacccatgcgctgaattatgaagaaagttttccggaactggtgaaacgtatgtgtgcgctatatcagaaagcgattgactttccttacgtagatgagaatggtgtaaaacgttccaagtttgtcaatttggatatggaggagtataaagatgctcactttacattgcgcttgtttaaagaagtgttgagcagaccggaatttaaaaactattcggcaggtattgttgtacaggcttatctgcccgatgcgtatgaatttcagactgaattgttggactttgccaaagcgcgtatggctgatggcggtgcgccattgaaaatgcggttggtaaaaggttgtaatctggaaatggaaacggttatctcttctcttcgtggctggcctaatccagtgaggacatcgaaaacagaagtcgatgccaattatttgcatattctggaatgggctttgttaccggagaatgcaaaagccttgcatgtgggggtcgcttctcataatttgttcactattgcatacgcctatctgttgagtcggaagctgggaagcgcggagtacatgacttttgagatgttggaaggtatggctgatcatgtatggcgtgcccaatcccaattgggaaatcatgtgattttatatgcaccggtggtaaaagatgagcatttcctgaatgcagtatcttacttggtccgtcgtatggatgaaaatacggctccggacaactttctgacccattcgttcaatttgaagccgggtacggatacttggcgcttcttgcagaaccagtttgaggaagcttataagatgaaagatgttattacgcatattcctacccgtacacaaaaccgcttgcatcgttatactcccgttccaccagctgatgtaatgaagaatgaacctgatactgattttgatttggctcagaaccaggagtgggttcggaatatttttgcgaagtggaagaagtcaccggcggattcacctgaaatcattcctttgcagataggagctgaaacggtggtttgtgagaagcgtcataaatatatggaccgttgtcaggatgatgaagtttgtgtatgtgaaatgtcacaagctgatgccggacaggtgatgaaaattttggaaatagccgaaaaagatcctgccggatggagaaagaccacattgcaggaacggcataaaataatgtatgaagctgccaacagactgggtgagatgcgtggtgatttgataggttgtatgtgtgctgtgacagggaagacagtggtggaaggcgatgtggaggtatcggaggggatcgattatgctcgtttttataccactagcatgaagcagtttgcagaattgccggatgtggatattgctcctaaagggactattttggttatttctccgtggaactttccgtgtgccatacctattggtggtattgtggcaggactggcaggaggaaatactgtgattctgaaaccggctactgttgccgctcctgtggcatggttgtttgccaaggcattttgggatgcaggtgtgcctaaagaggctttgcaggttgtcattacagaccgtgaggcattaaaggtattgactactgctccggctgtcaaacatattattctgacaggagggacagacactgcccaaaatattgcacgcagtaatccggctactccattgtcggcagaaaccggtggtaagaatgcaattatcttgacagcttccggtgaccgtgaccatgctattatgaatattgtggcttctgcttttggcaatgccggtcaaaaatgttccgcatgttctttattgctggtagaacgctcggtctatgaggacaagaactttcaagataagttgaaagatgccgcaactagtatgaaggtgggtagtgtatggaatcctgggaatgtggtaggtccgatgattaccaataagaatgataaattattgaaagctctggaactggaaaaaggggagtcttggctggttccacctcgttttcttgataagcataaatatgtattggctcctacagtgaagtggggggtacgtcccggcaactattcattcagaacggaattgttcggtccgatgctgagcgtggtttgcattgagaatttgcagcaaggcattgatttggtaaacagtttggaatatggtttgacttcgggcttacagagtctggatgaaggcgaacagaaattgtggaaagatttaattatggcaggtaacctttacatcaatcgtggtataacgggggccattgtaaatcgtcagccgttcggtggaatgaaattgtcggcttttggtggaggtgtgaaggcgggtggtcctaactattgtgcttgttttgtaaatattgcagataagccaggcagtaccaccgactatacacaaagttatgtgaaggcatacgagcaggaatttgcgcatgctcgtgatgtcaataatctgtatggcgagcaaaatgcattccgctatctgcctttaaagaatatggttttgcgtcttttcccgggagataacaatgaagatgcaaagatgattgctttggctgccagaatttgtcatactccattgagtattagttttgaacctggtgatgaccgtaccgctgcattggcttctttgggatgtcctttaaaagaagaagcgttggccggattcctgaaatcaatgaagaattatgaacgtatccgcacttgtggggctgatattccgatggaaatgtacgaggaagctgcacgtattgataagtatattgctacagctaaaccggtgaaagacggacgtgtggaattgattcattacatcaaggagcaaagtatttcatttgaatatcatcgttatggtagtattctggaggtgccgccggtagaataactgtttatattatcgggcggaaacgttacttggtggaatgaatattttttcgatcctccttgtttgtcggataaagcagatttgtgtaaaaaacttagaaataagtaagaaggataatatggtgtaaaagcagtccggcatatggatgaatatctgtgccggactacttttttatattgtggcggaagaaatggaacttttgataaacctttcggacacacgcttgtttatgataagttcatgtttttgacatgagtaacataaatctattgcaaagactaatgaaagaaaatagacctccttttttgccgttttcgcaatcttgctttaattattttaaagtaaggggctttattggattttcggaattgtgtatcagaacatttcatcctgattcacaaagatatatatgtccctatttgcccgatgcgcatatcttggagttccggcttccggcagcgactatagagtgtgttatcaataaacaaggtatatgcattgaggctatcatgtttaccgattagtaagtgcttaatcttcctttttcatttcttaataattaagccaaagcttgaatgaagaaagtttttcttcactgatggtgatttgggctttgtaaggaggaaggacactgactactatcttgccattaaaataaggttcggcatggtctatggaagcaatgctgataataatctgacggttggcgcgaaagaactgttctgggtccaactgttccattaatttattcagagacaggtcgattatgtgttcttgtcctttttgggtgacggcaaaagttattttattttcagaatagaaataggctatgtccgttacttgaagagaccagaaacggtcggctccataaataaggaagcgtgtacggtaacgtctttctttatgttgcagggtatccagcaatgtatccagatattcttgggggcgggagattcctttgttttgtaaagtttcgtatttgatgatggcatcgagcagacgtgtttcgtcgatgggtttcagtatataatctatgctatttactgtaaatgcgcggatggcatattggtcgtaggcagttgtaaaaataattatagaggaaggatgcacggccgaaaggaaatcgaatgcgtttccatctgccaattggatatcgaggaagatcaggtcgggttgtggattatctttaaaccaagccacagcttcgtccacactgcctggtataatggtcagtgtccattgcgggcgcagacgggtaatcatggaatgtaacaaacgtgctgctggcacttcatcttctataatgattgcgtttagtttattcatatgctaaaggtacttttacggtaaacaaattgtttgctttagtgacaatgattccttcgccgagcagtagtttgcaacggttggaaagattattcaatcctactcccgaagaggtgtcattactctttttaggttggatagggttacttactgtcaggtaataattttcaatttctatattaatttgcataggcttgtttgaggtgatggaattatgcttgatgacattttctaccagcagttgcaaagttagtggcgggagcatggcttcaggatagtcttcgggaagatgacatttgtaactgatgcaatttcctaatcggacttcgtgaagaaagaggtaggatttcataaattccaattcttcgcttaaaggtaccaagactttatcttgactttgaaggacatagcggtaaacgctggacagatgtttagtgaagcggactgcattggcgggattgtattctatttctgcaatcagcgtgttaagactgttgaacagaaagtgtggattgagttggttttgcagggcggtgtaacgggctgtgttattttctttttgaagttcggcagcttcttgttgcagttttaatgtgttctgaatagaacggttagataaaagtagtcctacaataactaactccaccaaccataccagaaagaggatgcgccagccgccatttgggaaaataaatatgttgtaggaacctaccagaagttttccgacaatcaataaactataattcaaaagaaagaacagaagagttacggctatataaatggtaataattttccaacgtttgcggatattcaatgcatattgactgtttagccaggaactgagccgcaacgttgagtagccaagaatattgaaggctgtgatgaagaagataaaagcacctttggaaaatagcatatctgccacatggggtgacaaatcggaataattggctagaagaagataggaaaatgctcctagtccggagaataaaaggccatataatgtaacattccatttcatgtgaacaaagctacaatattttacagaataatcatagactggagaggtgttaaattaatattttccattcactataggtacggataaattccgttccttggtgaatggaagaatatgcttttcatgatggttggttttatctaatatttgtttaaagctttcagcaatgcggaatagtgtccttgtgcagaaactttggcttgtacatagttggtttgtgaaatctgccgatagttttgtgcctctatcatttccactattgatactttcccttctgtatatctttccaatgccatttgttcgtttttgcgggctttttccaatgagtttctagttaattgtacttgttccattgcttgagacaaggatacacgggctgtctgcacttccagatttacatggtcacttacttggtgcagattatcagtcgcggcaccgatctggaaagaggctgcccgtttttcgttgcgtcgtttcccccattcaaaaataggtacagataacttagcataaacggcatagttgggatcaaggtcggatttaaagttatatcctggtgaagagtaacttccttctatgccgacatacagttgcggtttatattttgagtcagtcagtttctttgagctttcggctatgcctatttggtcgtatgctatttttagttccggtcggttagaaccgtcttgcttccataactgctcattcattacgatggaaggaatggtatcttccacttccgttatttcatgaagtgccgtgccaatcagtgaattaagtgccattcttcctgtttccaaactgctttttgcttggagcaattggtattcggcttcatttagttttacttctgccataagtaagtcttgcgggtcaactagtcctgcttcgactcgctcacggatagttttggtgagtgaggcgatagagtttcgatagtcggtagcaacttgcagaagttcggcacgggctacggtattccagtattgcatatcggtttggtagcacagggcggaacgaaagtattccgcctgatgtgctgccagactatgttgatgttttgccatccggatggtttccagcagacgcccgcctgtatagaccggctgtaatagggtaagtgaggcaccatatttcatgtccttgccttcgaacgtcagtgggttttgcatactgggcaagtccagagtgagctggatggggttgccggtatattgaaagttggcgtcacccgaaagtttgggacgcaaatcttttcgggcggctttttccagttcgatacttgcagagatgtgtttatccgccgccttcaggtcgtggttgtattccacagccatcgacctgtacttttccaataaatcactttgttgggagaaagtagcggacggaacactaaaaataaagataaacagtatattaattcttttcataggatgcatatttagaattactcttaattttataaaacatggcatataatgccggggttacgaataacgttagcaatgtggcaaacgtcagtccgaaaataatagtggctgccataccgccgaatgctatatcgaacaataacggaaccattcctaaaatagtagtggtcgctgccataagtacaggtcttgttcttgacactgtagcttctatgatggcggtataaggtgcgattccatttcggcgctgtatatttatttcatccagtaacacaatcacatttttaataatcatacctaataatcccagccatccggcgatggggaagaagccgaaatcgaatccggtgagcagcatacctatggcaaccccgataagggaaaggggaaggatacacaggataatgaccggttgtctgaagttaccgaataatgctacaagaattacaatgagcatcagaaaagccaaaggaaagaacttggcaatggcctgcatcgcttcgccttggtctttgtattgggcatcccagaagaaggtatatccttcgggcaattctatttcttctatctcttttcgtatttctccgtgtacttccgccatggtgtgtcccggttttactccacacatggctgccatggataactgacggttataagtacgtatttgcggaaattcccaagtggtttcaattttttccgttatttgtgacagaggtgccgaatgctccccgttccaaacagagaaatcccctaaagatcgctcgtctgtaatatgaaccccttccgattttagtaatacaggtactttcttttcattatcccgataaattcctacaggagttccatcactgatagacttgacggattgcatcatttgtgctttggtgatacctagtgctccggcttttaccggatcgtaaacagggcggatcattaaactcatgttgccccattcgttgcgggcgtccgctactttgggattgcggcgcatgatttctattgctttccctgccagtgaatctagtacagcaggatccggtcctagaaaacgggcttcgatgacggcttctgtcaaagggctaagctcgaatttgttcacttttatcaggggttcgggatatttctggcggatggagtcttgcagtagcgcatgtaattcctttgaatctttggaggtcttgcattttaccagtatttgtgcataattggattgaggaccgaaagatacattggataaataatagcggggtggcgtgcgacctatgtaggtagaaaccatttctgtttcttcgtgtccgcgtatatagtctgccagactgcttgccatgcggtctgtttcgttaatgtttgttccttcgggcagccacatatctacggtaaagtattgtttttccagtgcgggtacgaatactttaggaataaatttgaaactccaggcagagagtatcagcataatggccagtgagccgatggtgaccgaccggtggcggagcacccaatgtaaagcattgcggaaacggttgtaatattttccgtcgaacagtgccgctttcagttcctcgggacgtgggcggcggacaaattcctgtataaagaaaggtgtctgtgtcagtgcgaacacccagctgaacatcagggatactccgataaccacgactaatgaggataacagttcacctgtgatatgtggtgaataatagataggaaggaaagtaagaatagcgattacggttgctgccaacaagggcagggcggtagtcgagcaagcctgcatgatggctacacgtttccgcattccacgctccatattgattaaagcggagtctgacacaacaatggcattgtctaccaacatccccatggcgataatgatggcggccagtgacattcgctggagtgcgatgccgcaagccatcatgacaatgagagtggcgaagatggaaaaaatcagtccgctacctatcagcgtgccattcttgaacccgatgaaaaataatagaatggctataacagttaaaacggaaatgatgagattcaagacaaagccttgattggcaacggctgattcatatccttgatcgtagatagaggtcagttcatatccttcaggcatggattgggataattcgtcaatgcgttttttcacagcttctgccatatccactacatttccggtggggacggtggagatggcaatacctatggccggattaccgtcaatgcgcatcagattgctggcaggtgtctgataactttcttctatttgtgcaatgtcggcaaggcggaaatgttcaccggagcgtgatacgatagtcaggtttcttatatcatctaatgaataaaaatttccagtggattcaatgcgcagccgattttgtccggcatcaatacctccggcatctaccactttgttttgtgcttcgaaagcgcgggctatatccgaggtcgtaattccgctttgtgccatgacggatgggctgacagatacgtcaatggtaggtgtctgtattccgtagatttctattttagcaacatcttttattttcaatagttcgtttttgataatcttggcttcgtcttccagttcccgataggtatggctctttccagtcagtccatagaaaactcccaatacatctccaaaatcatcgttaacaacagatggacctgctccggcggggagtttgctttgtacatcatttactttacggcgtaatttgtcccaaagttgttgcatttcgtctgcccggatttccttttttacataaacggttatttttgaaagtcctgttcggttttctgttttcagataataaagttcaccaagagattggatggattcttccagaacatctgttacttgagattgtacctcggagggggatgctccgggatacggagtcagtacgagtgcttgtttgatggtaaagggggcgtcttccagttttcccattttgatataggagaacagcccaccggccaatatcaataccaacagcaagatagtgactgctttcttctgtagaaaatattttacgagtttcatgattgtttatttctgtgatattattcgttttctacacttattttcattccatccgataggaagcggagcccactgtttgctacagtttcatcaggatacaagccttcggtgatagatacataaccgtttggcaatagatcccctttctttacttttctcttagttacttgttgggttttggaatttactacccataaataatctccttctgtagggcgatggcaaagggctgtttgagggatggctgctccttgggaaagagttgaaacggaaggggcatttaggcttgctttaccagacatacctgccagtaatttcccttctttattgggaagtagagcggtcagcagataagagaggttattgcgggtagtccctttggaaatttccattatcttagcattatatactttatcgggttgggcgtcaaatcgtacttgtattgtatctagtgcttgcgctgcacgggcaatgtcttgagtgacataaatctccagtttaagttggtctatatcaataaaagaaatgatgggctgggttgctttcacatcttgaaatttctctatatatacttcacccacataaccattgaatggagcgataaggcgtgtgtcttccagttcataggaagctgtattgaaagttgtttttgcagtgatatagtctgcttttgctttttcataagtacttgcagaaacatttcctttgtcgtataacttttgtatacgttcgaattccgcttttgcctgatggtagattgcttcggcacgttctttacggatgcggaaatcgcgcggatctatttcggctatgatgctgccttgttggtatcggttacctgcgtatacatcgaaacggtcgatgggaccgcctactcggaaagataactcggaagtgcgaaaaggtcgggcaataaaagagaattctttgtcaccctgatgtgaaactggaacagcttgtgttgtttttacaataaggtcttgttttttatcattgccttcggcagcacaggaagaaagtagtgcggcaaggcttaataatagcatggaatgtacgtttatcttcatattttgtcttttaagtttgaaacaaaaataaagattgaagggagaacagatggggaagaaaatgctgaagccggaaaaagaagaccggaaaaagggaaaatgcatcctgaataattttatctatgaagtaaaaaaagatttattcaggcaactttttatacagaatagctgtttttatcagtaagatgattaactataaactctaaagaataaagcgtatgtattttatttggtacattattatcggaattattgctggttttgttgccggtaagttgatgagagggggaggtttcggtctctttattaatttattggttggtattgttggtggtgtcctgggcggctgggtattcagtttgtttggtattgcagcaactggtattattggcagtcttgttacctctattgtgggagctatattattgttgtggattgtttctttgctcaagaggtctgatatttcttgaattataagagtaaaaaagaaccgtcctgacgacacgcttgccgggggcggttcctaaccaaacaaatcaaaaaatataagtatattaactaattgcttccacctcctaaggcacggtaaagcatgatatgcagtttacaagattccacattcagagcgatacgttccaattcacaatccaggaaacgttcatcggccgacagtacatccagatagcctgcgaatcctactttaaacatttcatttgcattataaatagatcgatgatggatacggctttcttcttctttcaactttttgcgctggtgcatttgcgatgatgcagtaatgaggtttaatacttcttcataggcttttaataccgtatcgtgatatcctaacaaagcgatgcgttgctggcttttcgcatcattccataatgcacgtatagtattttgtttgaatataggtgctgtgatacctgcaccgagattgtaaaccagggatgcaggagcagtaaaccatttatccagatcaaatgcgttaaaacctccgtttcctccaatcacgatggatgggaagaaagcttttcgcgctgcagatacgtcggatttactagctaataactccagttcggcagcctttatatccgggcgatattgcaaaagttgtgacgggattcctgcatctgtgggaaactcataactacatgcagtttcaaatgacactcgtttcaccttgaaaggcagtcgtcctaataaggtggcgatggcacgttccttttcacttatttgctgttcgtttgcaagcagcatttcttccaatttaaggcgtcgtgaccggaattggtctacagaaagtcgggttacttcaccttctttcatcagttcatcggttaaattataagcatctctggctgttaggatggcttcgcgtagcacatatcgctgtttatccagtcctattaattcaaaatagtgtgtacctacttctgatatcaataaggtgcgtgccagacgcatagcttctacagactgcatccagcgggatacggccgatcgttttttatcggttagcttaccccatatgtcagcttcccattgaaaattgagtcctaggttgaaattccggtagggatctggaatatgtttgtctttttctaaatcgggagtgttggtggtgctgttaccaactccgtccatagtgtactcgccaaaacgttgtactccaccatcaatgcctaatgaaagatcgggcagcagcgctccttttcctactcgaacttgtgaacgggcaatggatatccgttctatagtttgaaggaatgaatgattgttatttaacgcttcggctatataactttgcaataacgtatctggaaaaaatgttttccatgacatggaagagatagtagtgctgtccgtttccctatccatatagaactcgggtaactctatcttttctgtcggagtaagggaaggggctttgcaacttaccataatcagacagaaagctcctattattaaacctgttttgtttatattgttatttttcatcttcttcatcatagctgactttattacggttaagatgtgcagaccaactctcgaaaacaaggtaaagtccaggtacaaggaagattcctacgaatgtaccgataaacatacctccggcggcagctgttccgatggaacggttgcccaaagcaccggctccgcttgccattaccaacgggattagtccgcatataaatgcaaaggatgtcatcaggatggggcgcagacggcttacggaacctctaacggcagcatcaaagatgctcattccctgtttgcggtactggttggccatttccacaataagaatggcatttttgcctagcagaccaatcaacattaccaaggctacctgggcataaatattattttccaagcctgccagttgcaggaaaaaataagaaccgaagatacctgccggcaatgaaagtatgacgggaaaaggcagtaacagactctcgtattgtgctgccagcaacaaataaacaaacagcaggcagataccgaaaataagaacggtttgtccacccgaatctttctcttcacgagtaactcctgaccattctatatcataaccgcgaggtaatgtctctttggcaatttgttccactgcttcgataacctctcctgaactgactccttcggcaggttcacctgtaatcaaggccgaggtgaacatattgtagcgtgtaatctggttaggaccgaatatacggtccatcgtcataaagttagagtagggtaccatattcccgtccttgttcttggcatagaacttatacagatcttcaggattcatacgatactctggagaagcctgtaacatcaccttatacatttgtccgaaacgaataaagttggatgagtagaaactgccgatataggattggagtgtttccatggattcatttagatttactcctaatttagctgctttagcaatatccactttcagcagatattgtggaaaattaggattgaatcctgaggttgctcccacaatgcgcggatcttcattcagtttttctactaatgtattggcaacatcggcaaattctgcaaagctgcctgctgttttatcttgtaaacgaagttcgaagccgctggcattaccgaatcccggaactgtaggaggcaggaagaactgaatatccgcatctttgatatgcgaggtgcggtctttgtatatctctataagttcggctgctgtttgatcgcgttcactccacggggtgagattaatcatacccataccgaaattggcaccttccgtttcagtcatcaaactataacctgctaatgtggagatgctttcaatttctttgaaaggaagcaatgcagcttgtacagcgttcaaggctttttcgctgcgttccaatgttgctcccggaggcgcatctacattgacataaatcataccttggtcttcattgggaataaagcctgaaggaagtacctggctcatgccgaaagtggcaaggaagaaaataatcagtgtggcataagtgattattttccggctcaaatacttgtgtaatccgatattgtatttcttttcaaagcggtcgtaccggcggttgaaaaaaataaagaaacgacgtagccatcctgcttttttcttcttttttccatcagcgggtttcagtaacaaagcacatagggcaggcgagagggtcaatgcgtttattcctgagataacaatggctaccgccagtgtcaatgagaattgccgatagaaaatacctacagttccctgcatgaagcccaccggaacaaagactgccgacatgactagcgtgatggcaataatggctccaccgatttcattaatagctgctacagatgctttataaggagagagtttctcatgatgcatctttacatggacagcctctacgacgactattgcgttgtctactacaatacctattgcgagcacaagggcgaataaggtcaacatatttatggagaagcccagcatttccataaaaaagaatgtaccgaccaatgaaactggtacggcgatagccggaattaaggtggaacggaaatcttgtaaaaatatatacaccacaataaataccagtatgaatgcttcgagcagtgtcttcagcactgactgtatggaggcgtcaagaaagcgtgatacgtcataggagatattgtaatccatgccaggcgcaaaactgctttctttgatttctgccattttggttttaatattttggatgacttcccttgcattggagccggggcgttgtttgatcataatagatgccgatggccttccgtcggtcatagaggtcatgttataatcttcagaatcgaattcaatagtggcaacgtctttcagacgtagcagtgaaccatcgggaagagctttcaatacaatctctccatattcttctgctgtgctgaactttccggtatattgtaatacatattgcagttgttggggtaatttgtctgaactgatacctgtcttgccgggtgctgcttctatgttttgattacggatggcttcagttacatcttgaggtaccatgttgtaggcggccagccgattaggattcaaccatacacgcatggcataatcacggctacccatgatttctaccaagcctacaccgtcaatacgttttaattcgcgcaaaatattgatatcggcaaagttataaacaaacttttcggtatgtgcactgtccgtactcatgatgttcaagtacatcaacatactgtttacttctttttctgtaataactccggcacggattacttcttcaggcaattcgtctagtacggtagtcacacggttctgtacatttacggcagctacgtccggatcggttcccactttaaaatagatagtagtaagggacataccgtcgttggtacaaacagtggtcatgtaggtcatgccgggtactccgttgatggcacgctctaacggggtggcgactgttttagacatcacatcggcactagccccggtgtatcgggcggttaccgttacagatgggggtacgatatcgggaaactgagtgatgggcagtgtcaaaatagacagtacgcccaagcagacgataatgacggagattactcctgaaagtatcggtctttttataaatagcttaaacataaactgtccgttttattttacgataggttgttttaattcaacttcttttctgattgcttccatatcaatggtatcagtcttgatggtaatgccatctttcatcatttgcactccctcgtatacgatggcagtgttaggagagaagtcttgtgtcacatagtaattattatagcgttccagcggttggaagctgcgtacttttactacactggcactatcaacggtatatacataggtgaaatcttgaatttcgaatgttgatttctggggaactaggcagatgttgtccatttgggtcatcatacgtacttttccagtcactccatgtttcagcagtccgtccgggttcggaaaacggacacggaaggcaatggagccggttcctcgttcaaagtcaccttctactgtttctaatgtgcctttgtgggagtagatggaaccgtctgacaaaatcagttccacattattttcttcgtgctgtttttgtccgctaagttgttggcgcttgtattccagatactcgctttcgttcactttatagtaagcaaagatctcggaaatatcacttacggtagtcagtaagctttgcggatttaccagacttcccgtcttataaggaatacggtctatgtagccgtcaaaaggggcagtgatagtagtgtaagaataatccatctgtgaacgttgcatttgtgcttttgcctgttccactttcatttgggctacttctttttctttattggcttggtcgagtcggatttttgataagatttgtttgtcaaccagccggcctattctttcggcttcataatttgccatttcatattgtgcctgtgcttgtttgtaattggcttgcgcctcttttaccgtttcgctatattggtcggaactgagttggaataggggctgtccttttttgactttctgtccttcgtctacatatatttgttgaacaaatccttccactttgggcttaatttctacaaactgtatagcttgcacatcagctacatatgagcgtggaaactcaatggttgtggggtgaagaatggtgatgggaatgaattctttgtgatgttcctgcttgttgtccgattgaccacaagagcatagcaatcctgtgcatgtacacaggaccgcaattttctgaaaattactcttcatgaaattacgaatacaatttaaaaagattaataattgagtttgagtaaataaaagatccggcttgcattcaaatctttcagaatacaaggccaatatgtatgaatatgctttaatgtgacatattaaatgcggtacacacaaaagataatgtgatgatgtaccactttccccggattttcactgacaggtgtgtaactttgtaccggaacttggggaatagcaaaaagattgaccagcatgtcgatagtgcagggtaaaaaacgactgtttggcagttgtgcacgtcccgactggaaataataagtttcttctcctctgttttcttcattgttgtcagaaggcagggtgggttgttccatcgtttctaccatagccagattggcatcaatcagtggagcgcatacatcaaattgtacgagtaataacataattacgcatactattcttaccacatattttttgataccgttgaacatgaaagatactttgtttgtcaattcgtttgcaaatttaatataattgaacactgttttcaaactaatcatccaaaattagtgagttttaatatatcctttctcttttttggaactactatcctttatactgactgaaatctgttatttttgtactcagtattttaaataatcagataatattacttatgttacaacccgaattgaaatttcgtcgagataaaatacgctatttgatggctcaacaaggcattgatgctgccctgatagcttgtaatgtaaatttgctttatacgtatggtgagatagtgaacggctatctttatttaccgcttcattcaccggcacttctctttgtaaaacgtcctaataatattgtgggagaatttgtattccctattcgtaaacctgagcagatagtggacttgttaaaagaaaatggtatacctgtagcttcaaagataatgttggaaggcggggaactgccttatgcggactatatgcgtcttgcatctctttttcctgaatcggaggtagtggatggaactgctattattcgtgaagcgcgtagcgtaaagactccgctggagattgaactttttcgtcggtcggctgctttacatgctcgagcatatagtaagattcccgatgtataccatccggggatgactgatcgtgaactatctgttgaggtggaacgcctgatgcgactggaaggttgtctgggaatattcagagtatttggtcagagtatggagatatttatgggaagtgtgttggccggagataatgcagctactccttcgccttatgattttgccttaggtggtaagggattggacccgtctttgcccggaggaatgaatggaactttgttgaaagaggggtatagtgtaatggtggatatagggggaaacttttacggatatatgtgcgatatgagtcgtgtgttctccattggaaaattaaatgatgaggcttatgcagctcatcaagtctgtcttgaagtgcaggataaggttgcctctatgacggcgcctggtgtggtgtgcgaggatctttataatgcggccattgagatcgtgacgaaagccggatttgccgatcgttttatgggggtgtcccaacaggcacgttttataggacacggcatcgggttggaaatcaatgaggcaccagtgttggctccgcgtatccggagggagttggaagagggaatggtgtttgcccttgaacctaaaatcgtattgccgggagtaggaccggtcggcattgaaaattcttgggtagttacagaaaacggagccggcaaactgaccatttgtaatgaggagattatagagctttgattccttggatgtaaatattgaagcggaaatatcaaaaaaacgaaaaattttatggttcttgttctagtgtcattgggggcaaagtgaagaacttgaatataaaaaagatcccgaaacttttagtttcgggatcttacatggtttgaagtatattttttattcccactcaatggtcgcattgggtttgggcgacaggtcatagcatacgcggttcacattctttacttcttttagaatacggtcggtaattttcatcagaatggaccagtctatcggttcgatagtagctgtcatagcatctacggtgttgacagctcggataataacaggccagtcaaatgaacgggcattgtcacgcacgcctactgatttgaaatcgggtactacggtgaaatattgccatactttcttgtccaagcctgccagttggaattcttcacgcaagatggcgtccgattcgcgaacagcttccaggcggtcacgagtgatagcccccaaacagcgcactcccaaaccaggaccagggaacggctgacggtagaccatgtcgtatggtaaaccaagttccactccgcaggcacggacttcgtctttgaacaactggcgtaaaggttctactaattcaaactgtaaatcctcgggtaagccacctacattgtgatgggatttaaccattttggctgttttagtaccactttctacgatatcaggataaattgtaccttgtcccaaaaagtcgattccatttagcttacgggcttcctcttcgaacacacgaataaattcaccaccgataatcttgcgtttctgctccggatcagctacattttccagtttactcaggaaccggtctgtagcatccacgtaaatcaaattagcgttcaactgatttttgaaaacttcaattactgcttccgattcacctttgcgcattaatccatggttcacatgtacgcagaccagattattgccgatggctttcagcaacagggctgctactacagaactgtctacacctccggaaagtgccaataatactttcttgtcgcctacctggcggcggatcaattcaatctggtcattgacaaagtttgtcatattccagttagcctctgccttgcaggtatcaaaaacaaacgattgtacagcattctttattgtttccacatcatccgtcagttggggaagcttcacttcgcaacatgctttgtcatgaccggcagccattacggggatccctgctttgtaaatctcgggaagcacgtcaatatccactccgtcaattacatggttgggaccgccattgataatgacaccctttacattgggcaatgctgtcagctcagcggctgtgatatcgtgcgggtaaatttcactatatacacccaaagcacgaatggctctggcaagcacggtgttttcggtgcttcccaaatccaagataacaatcatatcttgtttcattccgttatgttgtttttaagttattagttggttgtctattattcccactcaattgtggcaggcggtttggacgagatatcatagcatacgcggtttacaccttttactttattgattatgtcgtttgaaaccttagccataaattcatagggaagatgagcccagtcggcggtcatggcatccgtactggttacggcacgtagggcaacggcacgttcgtatgtacgttcgtcccccattactcccacactttgtacgggtagcaagattacgcctgcctgccatacttggtggtaaagggatgtttcgtttccgtccgagtctttcactttccagtctctcaatccttggatatagatatcatcggcgtcttgcagaatacgtactttctcaggagtgatatcacccaaaatacgtaccgcaagtcctggtccggggaatggatggcgtgtaatcagatgttccggcatacctagttcacgacctacgtggcgtacttcatccttgaatagcagacgcagaggctcgcatagtttcaaattcattttttcgggcagtccacctacgttgtgatgacttttgattacagtgccggtgatacttaatgactcgatacagtcaggataaatggtaccttgtgccagccatttcacatctttaattttatgagcttcttcatcgaatacgtcaataaaacctttgccgataatcttacgcttcttctcaggttcttccacacctgccagttcactgaagaatttttggctggcatccactccgattacattcagtccgagacattcataatcatggagtacatttttgaattcgttcttacgcagcatgccgtgatctacaaaaatgcaggtaagattcttgcctatcgctttatttaataatacggctgccacagatgagtctactccgccactcagccccagtactactttgtcatttcccagttgcgctttcagttcggctacagtcgtttcaatgaaagaggcagcgctccagtcctgtttccccccgcaaatgtcgactacaaaatttttcagaagctgggttccgtcttcactgtggaacacttccgggtggaactgtactccccatactttctcttcctttatttgataagcagcgatggctactttatctgttgaagcgataattttgaaattctccggaatggcagtgatggtatctccgtggctcatccatacttgtgagtgttcacggacgttcttcaatagtgggttctcttggtcgaaagtggaaaggtgtgcacgtccgtattcacgtgtgccggccggctccactttcccaccgtttgtataagacatgaactgtgcaccatagcagatacccaaaataggatactttccgcgaatgtcactcaaatcgactttaaaggcgctttcatcatacaccgagaaagggcttcccgaaaggataacgccgattatggacggatcattgtgtggaaatttgttgtaaggcacaatctcgcaataagtattcagttcgcgaacgcgacgggctatgagctgtgtggtttgtgaaccgaagtcgagaataatgatcttttcttgcatatatattaagatatgtaaatgatttcgtgccgcaaagatactcagaaaaaataaaaatccgtcatgctgttgaggctttttataattgaattggaaaaactttgttcttcctgctcccttgtggaaaaatatgcaaaaaaaagattggaatgtttaggaaatgtcggctggtatataaatcacgggctgtccgacaagcatttgagggcagcccgttttttgtgtggataatattttattttttgccagcctgttccttcaacaagtcacggatttctgtaagtaatacctcttccttgctaggggcaggtggggcggcgggagcaggaacttcttctttcttgcgattcagcttggcaagtaatcttataaataagaatatagaaaaagcaatgatgataaagtcgaaagtagcttgtaggaagttgccataattcaacgttacggcagctttttcaactccatccactacttcggccggctttaattgtagtttcaaatctgtaaagttcacgccacctaccagcaatccgatgggaggcatgatgacatcggccacaatggaagatactattttaccgaaggctccgccgatgatgacaccgactgccatgtcaatgacgtttccgcgcattgcgaacgccttaaaatcttgcaagaagctgctttttcccatttttttttattttaatatgaatttatgtgcgaatataaaaacaaattcttatttttgcaccgcgtttaggaaataaatactaaacgtttaacaacattccaacgtagagtgtttaaaagctatattataaaacctttaaaatttaaacaaaatgattaaagtaggtattaacggatttggtcgtatcggccgttttgtattccgtgcagctcagaaaagaaacgatattcagatcgtaggtatcaatgacctttgcccggttgattacttagcatatatgttgaagtatgacactatgcacggacaatttgacggtactatcgaagctgacgtagaaaatagcaaattgatcgtgaacggcaatgcaatccgcgtaacagctgaaagaaatccggctgacttgaagtgggatgcaatcggtgctgaatacgtagttgaatctactggtttgttcttgactaaagaaaaagctcaggctcatattgaagctggtgctaaatatgtagttatgtcagctccttctaaagatgatactccgatgttcgtttgcggtgtaaacgaaaagacttatgttaaaggtactcagttcgtttctaacgcttcttgtactactaactgtttggctcctatcgctaaggtattgaatgacaaatggggtatcactgacggtttgatgactacagttcactctacaacagctactcagaaaacagttgacggtccttctatgaaagactggagaggtggtcgtgctgcttctggtaacattatcccttcatctaccggtgctgctaaagctgtaggtaaagttattcctgaattgaacggtaaattgactggtatgtcaatgcgtgttccgactttggatgtttctgtagttgacttgacagttaacttggctaaaccggctacatatgctgaaatctgtgcagctatgaaagaagcttctgaaggtgaattggctggcgtattgggttacactgaagatgcagttgtttcttctgacttcttgggtgatactcgtacttctatcttcgatgctaaagctggtatcgctttgactgatacttttgttaaggtggtttcttggtatgacaacgaaatcggttactctaacaaagtattggatttgattgctcacatggcttctgtaaactgctaatcagttaaaaaccatatagcgaaagccgtctgaagtaattcagacggcttttttttatgtagttttgcgtgctaagttgcacattttcgttatctttgtgcgactgttacaaaaacttaggatggaaaagtacgatttgataacgatattaggacctaccgcttcaggaaagactcctttggcagcggctttagcttacaagttggataccgaaattatcagtggagatagccggcaggtatatcgccggatggatttaggtacgggaaaggatttggaagactatgtcgtgaatggacagcaaataccttaccatctgatagacattgtagaccccggatataaatataatgtatttgaatttcaacgtgattttttgaatgcttatgatcaagtgagatggaaagacaaacttcctatattatgcggaggtacggggatgtatcttgaatccgtgttgaagggatataggctgcttcctgttccagagaatcccaaacttagggactcgttagcagataaatcattagcggaactcacccggttgttgtcaacttacaggaaacttcataactctacggacgtagatactgtaaagcgggctatccgggccattgaaatagaagagtattacaagcaccaatcagcggaataccgtgagttcccgcaaattcatagtttgatcattggagtagatatagctcgtgagttacgtcgtgaaaaaatatcccaccgtttgaagcagcgtttggatgaagggatggtaaacgaagtgaaggctttgttggatagtggtatttcttccgaggatttgatttattacggattggaatataagtatttgactttatatgtcttgggtaaactttctttcaatgaaatgtttcatcaattggaaatagctatccatcaatttgccaaacggcagatgacctggttccggggcatggagcggcgagggttcactatacattggctggatgcttgcctgcctatggaagataaggtggaaaaaatcattaatttgttacacactaaaaactaaatgttatggctgtagaaccaaacagatgggggattatttataatccgaaagccggaagccgtaagactcagaagcgttggaatgagatacgtagctatatggaaaaccgtaaggtggtttttgactacgtacagtccgaaggttttggatcggtggaacgactcgcccgtaccttggctaataatggttatcgaaccattgtgattgtaggtggagacggagcgatcaatgatgctattaacggtattatgacttctatggtggaggataagacaaatatcgcttttggaatcattcctaatggtattggtaatgactttgccaaatattgggggttggatgaagataattataaagcagcggtagattggattatcaatcgtcgtctgaggaaaattgatgtggggcgttgtaattattttgatggagagaagcacacctcccgctatttcctgaatgccatatatataggtttaggtgcgcgtattgtacagatctcagatggtacccgccgtttttggggaatacgtgagttgtcttttgccgcttccatgttcctgttgctgtttgaacgtaaattgtaccgtacacatctttgtatcaatggcgaacatattcgtggacgtatcatgacggtatgtgtgggaagtgcccgtggatacggtttgacacctagtgcagttccttataatggctggttggatgtgtcggttatttatcgtccggagttaattcaacttttctcgggtatgtggatgctgttgcagggacgtattttaaatcataaaatggtgaaaccttatcgtacacggaaagtaaaagtactacgtgcgcagaatgcttctgtcagtttggacgggcgtattttagaccgccattttcctttggaaattacgatccagccggaagctataactttgattatccctaattaaaaactatagatatccatttcttgctttaaggatagaggcagagtagatatctcaatgaatagacgtaagataatgacaatttcagatttaagaaagacagataatttctttttactggctggtccttgtgtgatcgaaggagaggaaatggctctccgaatagcagatcgtattgtgaaaataacagataaactgggtattccctatgtgtttaaaggatcttatcgtaaggctaaccgttcccgtttggattcgtttacaggaataggtgatgaaaaggccttgaaagtacttcgtaaagtacgggaaacttttggaattcctgtggtaaccgatattcatagtgctggagaagctgctatggccgctgaatatgtggatgtgttgcagattcctgctttcctgtgtcgccagactgatttgctggtggcggcagctcataccggaaagattgtcaacatcaagaaaggacaatttttatcacctggcgccatgcgttttgctgctgacaaagtggtggaggcgggtaatgatcaggttatgctgaccgagcggggaacgactttcgggtatcaggatttgattgtagattatcggggtattccggaaatgcagactttaggttttcctgtaattctggatgtgacacattctttgcaacaacctaatcagactgccggtgtgacaggtggtatgccgcagcttattgaaacggtagccaaggctggcatagcggtaggagtggacggtttgtttatggaaacccacgaagacccttctgtcgctaagagtgacggagcgaatatgttgaaactggatttgctggaagggctattgaccaaactggtaagaatccgccaagtgttataaatgttattcgttggggattcacaggtaagatgggttaatttatttggactatggggcaacttgcatgaatagtataaaataaggtcggtttttgcagtagaaaccggccttacctttctttctccgtcaaaacagaaaaaagaatagaagcagatgtggattatttttttagaatataagccttcatgcgggctatatcatttaagtaatcttgcaaatcttgttcatggtcttcttcttctgccataatatgtttggcaatatcacaagtggtgaagtcaattccgtttgtgaattctgcaatttgctgatagcggtagatggcacaacgttcggattctacattttgtttcaacaagatttccgaaccgaaatctacgggcgcatcatatttgcagcgagctaaatcaaaccattgtttagggtcaagtacgggtacgccttccaattcaatgatacggtcggccaataattttgcatggttatattcctcggctgcatgttcttgaaactcgcgttgtacatcaccgcgcatagcgccttctactacgaatgaacctacccagtattggtagaaagccaaccattcttcggacagagctgcattcagctgagccaataagtccacaatgtcaattttatccttcaggatattcacagattctttagccataatgtaaagtttaagttagtgtttattattatttagtccacagcgggtatagtcatgtcgtctaacacacctatgccttcctggtctacatctttttttacgtcagaactggtataaagccagataccgaatcccagcacaaataaaataaggaggatgattccccataatttacctttactcatagtttcttggttttagtttctttaataacagctggtattgaaaaaggttttgtaagtagagaaaaaacaggcgtctgttatggaaaaacggacgcctgtgtgtgtgaagtatgaattgatattagattttatcctattttgctgattttttttagtttctcttcatcaatgattttaatttttctaccgtcgatggtaatcagtttttcagttgcaaagttagaaagcgtacggattgcgttcgaagtagtcatatttgataagtttgccaaatcttctcgtgaaaggtaaatgcttagtgtagattcatcttcttctactccataagtatctttcaaaaataacagagattccgccaatcgtccacgaatatgtttttgcgtaagatttacggttctttcatcagaaattcccaaatctatagaaagttggcggataaagaacaaagctaattcagagttgtcttttatcagtttcataatggccggcatgggaataaggcagatagtgcaaggctcgaaagcggaagcagctgtcacgaagttcccttcggcaaaaaaagctcggtatgcgaaatattctttcgtctttaatacgcggataatctggctacgtcctcccacaccttctttgtagatttttacttttccactaagaagacacataaggtgcatcggagtttctccttcgcagtatatcgtctcattctttttatacttctgtatcgtaaagttctgagccaagaactctctttgttcctgtgttaaaggttgccataagtctggtatactttcagcaatctcagtttctgataattcttttctaaccataaacgtgctataaaaccgtgttatagagcacaaatataagaagaaaaaataaaaggacgaagtaatcagaagaaaaaagaaagatatattattaatttatcttcaaaaaataacaaaaggataggttcttatctcctatcctttcttttttttgtgaaattttatttggtgaacagtaattcacgatatttaggtaatggccaaatctcatcgtctatttctagttccaaatggtcaatatggtcgcggatttcttccagatatggacgcacttgttcctcgtagctgaaggctttctctacttggcttcccaaatgatttgctacttttcgggcttctgtcatattgtgcacggcttttttaatagcaagtatgcggttttgaatttcacgtaccaaattcttccggtcttcggtcagctcttcgtattcttcggtggagaatatctctttcagaccacgaagattttctaatagtctgttctgataaattacagctgtgggaacaatatgattgatagctagatcgcctagtacacgactttcaatctggacctttttagtaaacttttccagttccacttctatacgacagaacaattcattttcattgaatattttttcgcctatcagtactgcacgagattgctcatcgttgaacttcaggatggcttcgggtacatggcagatattggtcaatccgcgtcgcgcggcttctgctttccattcttccgagtagccgtcaccttcaaaacggatgttttgtgaagcgatgatggtttcttttaataccttatacagagcttcttcctgttccatccctccgtttactaatttatctatctgggtcttgaactcattcaactggtgtgccatagcggcattgatcacaatcattgatgcggcacagttggcagatgagcctgcagcacggaattcaaaacggtttccggtgaaggcaaaaggagaggtacggttacggtctgtattgtcttgcaatatggcaggtatgcgcccgatacccaattgcaatgctttcttttcatcaggggtcagttcggcgtcattcagacgtgccactacttcgtccaacatatgggaaagatgacgtcctaggaaaatagacagaatagcggggggggcttcatttgctcccaggcgatggctgtttccggcactgacaatagaggcacgtagtaaatcttggtttttatagaccatcatcagtacgttgactatgaaagtcaggaaaagcatatttccttccgcagtcttggcaggagagaacaaattgatgcctgtgtctgtacaaagtgaccagttgttgtgtttgcccgatccgtttactcctttgaatggtttttcgtggagcagtacagtaaaattgtgtttggaagcgatacgtttcatcaggtccattaccagctggttatggtcgttggccagatttacatcttcaaaaataggagctagctcaaattggttgggagccacttcgttatgccgtgtttttaccggaatccctagtttgtgacattccagttccaattctttcataaaactggttacacgtggagggatggaaccgaagtagtggtcgtctagctgctggtccttggcagacgagtgtcccatcaaggtgcgtccggtcaggcaaagatccggacgtgcattatatagtgcggtatccactaaaaagtattcttgttcccaacccagattggcgaatacgcgttttacgtttggatcgaacattctgcaaacctcagttgccgctttgtctacagcacctaatgccttcaacaaaggagttttatagtcgagtgcttcgcctgtataagagatgaagatagtaggaatacaaagtgtgctgtctacaatgaaagccggagaagaaacatcccatgccgtatagccacgtgcttcaaatgtgttccggataccgccgttgggaaaactggatgcatccggttcttgttggataagcagtttgcccgagaagcgttctataacattaccgtcgtcaccgaattcaataaagccgtcgtgcttttcggcagttccgtcagtcagaggctggaaccaatgagtgtagtgggtaacattaaaggtctttgcccaattcttcatgccattggctatcatgtcggccatttcacgattgataggggtacctttctcgattgcgtttattactgctttataagcctcactaggcagatattcctgcatttttttacggtcgaatacgtggttgccgtaataatcagctaacttttcagaggggtagtcaactttaacggggcgtctgttggctaactcctgtagagcaaaaaatctcattttggacatgttgtctttcttttactggttgttggctgcaaaaatactgctttttgattaataattcgctatatcgctaatcatttttcatttctgttaaggatgttaattaagtattatcatgcgtcagcctgttggtttttgtttatatttgctcttcaaacaatgaaaagaaagtacattgatgcactatatacggattgtcagcttgattatattttgtcttttgttacctttagctgttcaggctaagagggaaaaggttgatatgcccgacaagccgatggtgtccgattccattcttcagtgtattttccagttttcgccgttctattcccgtatcattgatgagtataaggctgatttatatataaaaggaaaagtaaaggtacataagcgcaatcaccttatccgctatgtaccgtccatgtttcgtttcgaaaaacacatcaatgattaccttatggaatctcttagtgagctgcattatacggcccctgatatatacgaccgtaagataaaagcggtatccactacatttccacgtaacaggggacagataacggatgtgatggattatttgaacatgaatatctattcttcttcattgatgtccgataaacttctttctcctttggataagaaatctagcagatattatcattatttattggattctatagccggtcctcccgattgccagcggtataaaatacttattattcccaaattccgtggtacacagttggtcagtggatatatgtgggttagtgatcagatatggactattcgtgaactttatattgaaggcgtttatgatgtgatccgcttcaaggtccgtgtcaagatgggagaggagggcgatgtggagtttctgccggtgcagtttgatttgaatcttgtttttaagtttataggtaaccatctggaaatggatatgggagcctggttgaaatacaatgaaattaaattttatgaaggagccgcccggcgtaaatctcaaaagaagcatcgccatgacctgacggaatcctataagctgacttgtgattcggaacagctgataacagataaggaaaagttcaatgagctgcgtcccattccgctgtccgctttggaggattctttgtatagaagttatgctttacgtcaggatacgcttttacgcgtaccgaaaaaaaagaagaatgaacatttggagttttggggggagttgggtgacatgcttatcagtagttacaatgtgaatttgtccagtatggggagtgtgcattgttctccacttattaatccggtgctgttggattatagccacagcaggggcttttcgtataagcagaagtttaaatacagtcggctttttcatgatggacgtatacttagaatcagtccgcagataggttataattttacacataaggaactttatgtgaaagcggatgccgattggcaatattggccggaaaagcaggctagttttgaggttagtgtaggtaacggtaaccgcatatatagtagtgtcgtattggatcagctaaagcaattgcccgatagtacctttaattttgaccaattggaattggactatttcaaggatgtgtatctcaatctgttccataatatagaaatagtgaacggcttgtttattaaagcaggtgtttccgtacattggaggtatctgataaataattcgaaagtcattcttgaaaagccgttgcccgataaggattgggctgcattgcgaggtatcagatcagaatacaatagttttgcacctcgtatacgtattgaatggactcccggtatgtattattacatgaacggtcgccggaagatgaatgtaggttccagtatgcctacttttatgctggattatgaacggggcattaaaggtgtattcaagagtacgggtgctcatgaacgttgggagtttgatatacagcaaaacttgaaactgagcggaatccgaagtatcggttatcgcattgggggggggatgtttaccaagcaggaagatatgtatttcgtggattttgctaactttgcccgtcgtaatcttcccgaaggatggaatgatgatattggtggcactttccaattgctggacggacgttggtataactcctcacgtcagtactggcgggggaatttcacctatgagtctccttttattttcttgaaacccttaaaccgttggctgggattagtccagcaggagcgtttgtatggtggtatcctgttcatgccacatcttaatccatatatcgagttgggttatggcatcggcacacatatatttgatgtgggggcttttgtaagcactatcaacgggcaatttgatacctttggttttaaattcactttcgagttatttaataaataatcctgttcaaacaatctgtttggttttctgtttattacaacataacagaaactaaacagtgtatgcattataaaatatttttatgtgttcttttgttcccggtttcattatcagctcaaaacggggaattatctttaacattggaacaatctgccagcctgatgaacaagggcagccgcacgttgcaaatggcggataaggctgtagatatagcacgcagtgagcgacaaaagatgaatgctttttggtatccgtctttgaatgcatcgggtgcatacgtccatttgtccaaccatattgaggtcaaggaacctttaaggcaatttaccgatccggcaaaagactttgtacattccattgtgcccgatgataaatttatttcttctattcttgataatataggtgcgcatacccttacttttcctttattagaacgtaacctgacgaccatagatgctaatgtgatgtggccgctttttacaggcggaaaacgaatttttgcaagccgtatcggcaaccgtatggtagatttggccaaagcaggtagggaagaggcgggagctactttgctatcggagttggtggaaacttattatgctttgcgtctggcgcaaagagtggtggatgtacgcgagcaaacctttttaggcttgcagaaacattaccgtaatgccatgaagctggaggagaacggtatgataaataaggccgaacgcctctttgctcaggtcactatggacgaggccagacgtgagttggaatctgcccggaaagatttgaatgtggcgcaaaatgccttgaaagtcttgttgaatgtggaagacgccatatccatcaaccccagttctcctttgtttatgaaccatgatctgcccgatgaactttatttcaagaatctggtaagtaccggcagctatatagtaagtaaattgcgaatacaggaggcgatggcagataatcaattgaaaatcagtaaaagtgcatatattcctaccattgcattgtttggaaagcagacactttatacagagaatcttccgaaaaacctgatgccccgtactttggtaggagtgggttttacttggaatatattcgacggactgaaccgtgaagccaatatccgtcagacacgtcttactaaacaaactttgcaactgggaagggaaaaggctcagaatgaattgggtgttttggtagacaagttatatagcgaaattcagaatgcaaaggatgatgtcgccgcactcaacaccacgattgagatgagtcgtgaattggtacgtatccgtaaaaaatcctttcaggaaggaatggctacctctactgatgtgattgatgcggaaacgatgttatccaaggtgcagattgcttttttgctggcttattataaatatgatgtggcactggcatctctgctctctacttgcggaatgcccgaaagtttttggcagtatagccgtaccggacaaaccgagaactttatattcgggaaataataaaaaaagaaaacaatatggaaaaagagaagaaacagttaggagtcgcttttatcgttgttcttgtggccattgttatggtgtctgccattgggattatagctatgagcaataaaccggttgtattgcaggggcagatagaagctactgaaatacggatttccggaaaacttcccggtagaattgatacctttttggtccgggagggacagtatgtaaagatgggtgacaccttggttgtgattaacagtcctgaggcttgggcgaagttccagcaggtaaatgccttggaagatattgcgaaatttcagaacaagaaaatagacgacggtacacgtcggcagatagtccgttcggtagaagaattgtggaacaagtcaaagagtgacttgcaactggccacggtgacgtatgaccgtattcaggcactttacaaagatagcgtggtcaccagccagcggaaagatgaagtggaagccatgtataaagctgctgttgccgccgaacgggcggcgcatcaacaattcctgttagtgaaggacggagcgcagaaagaggataaagagagtgcccgctccttggtggatgcggctcggggcactgtgaatgaggttcaggccttgttgatggatgcccgcctcacagctcccgaagacggacagatatcaaccatctaccccaagcgtggagaactggtaggagcggggactcccattatgagtctggtagtattggatgattgtcatgtagtgcttaatgtccgtgaggactatatgccttatttccgtatgaacgagaattttatgggagatattccggctcttgatgtgaaaaacaaggcatttaaaatcaattacatcagcccgttggggagttttgccacttggcgttctaccaagcagacggggacatacgatatgaaaacttttgaaattcatgcgctgcctgtagagccgatggagggattaagaccgggtatgtccgtcttggtaaatctggatgaattgaaatgatagaaggatagctatgttattctgattgcagtgaatggtaaatataaatgaactacttgaatgaaagaatctccttttatagcggtattgaaacgtgaactggaccgtatggtttcccggcgcatttattttgcatcgtgtatcgtcttgcctttgttttctatcttctttatggctacaatttttggtaacggacagatggagaatctgcctgtgggtgttgtggatggtgataatacagccacttctcgtgagataattcgtatgaccgaggctgttcccactttccgcatcattcggcattatgccgatgaagcggaggccagggcagatgtgcagcggaaaagtatttatggatacctcagtattccgtctggttttgaagcaaaggtgatggatggtaaggaaacagctctgacttattattaccattatgcattgatgagtgtgggaagtgagattcacggagcatttcaaagtttgttgaaaagcatctcggtagttcccattgtcactcatgctgtggcattgggtataaatcaggaagagatagaatcttttctgttaccggtcaccacacagaatcatccgttatttaatcctgatatggattattcggtctatcttacacagccattcttctttgtttttctgcaagttatcttgttgttggtcactacatactccattggcagtgaagggaaattccatacttcagccaattggctggcagtggcagatgggaatatctgggtggcggtcactgccaagttacttccatacagttttatcttcatcgttatgagtattctggcaaactatgtcttttttggtgccatgcatataccgatggattgtggtttttgggcgttgaatcttacttcggcactattggtcattgctacgcaggcgctggcggtttttctgttctctctttttcctgcgttgagtattattatcagtatcgtttccatggtaggatcgttaggcgctacccttggcggggttacctttccggtgcttcacatgtttgcaccggtgtactatgcctcttatcttttccccgtccgtcactttgtcgagattggacagaatctgctttatggcaactatggttatgcgtatatgtggggcaatgtagcctgtctgctgttgttccttattcctcctttattgttgttacctcatttgaaacgctctttaatcagtcggaaatatgacgatattgaataatatattagctgtatcttggcacgagtttcgtgtgatgtgtacccgctattccattttattggtactcagcggtggcatctttgtgtatggattactttataactatatgtatgctcccaatgtggtacgcgatgctccggtggcagtagtggatatgagtcgcactccgttaagccgcagttacatccgtttgctggatgccactccgcaggcacgggtattgacaaacaatgctgatttgcctgctgctaaggaattgatgaaatatgatgaagtggtgggtattgtttacattcccgcggattttgacgctcgtgtggggcgtggtgaagaagcgatatatattatgtacagcaccactacggctttcctttattttgcttccatgcaggaagcgtctgctggagccatgcttgctgtgaatgatgatgtccgacccgagcaagtggtttttctacctcaggatgatatacaatctgtggttcaaacaaggtctgtcgatgtggtgggtactgccctgtataattataccgatggttatggtacttatttgatacctgccgttttgatggttgttatttttcagacgttgatatttgttatcagcatgttgagtgggaaagagcgtgaaactggagatatactgatgtttgcaggccctgaaggaagggatctttcttttttacgtatggcatccgtagtgataggaaaatcatttacttatttagtcttttatgctttattctctgtctttttgttggggcttcttcctttagttttccaattgcctcatttagcatatccgtggaaaattgtggcacttatgataccttatattcttgctaccagtttctttggattggcctgttcgttatttttcagtgatagtgatgctccattgttgttggtagctttcttctctgtaggattgattttcctgtccggagtttcttatccgctggagttaatgccttggtattggcaatggattcattatatggttcctgcggctcccggaactttggcctttgttaagataaattctatgggagctagtatgtctgaaatcagtcagcaatatattatcctatggatacaatgtgcgatatactttgttttggcttgtcgagcctatcgctacaatataaagaaagcaaagtgtgaaagacaataattttatgtgtgattgttttttatgtaattcgttttgctgattctctattttttataaggtctgtttggagctggagcgaggggcctgaaagttgttgatattttaattcttggtgattattctcttgttgtttcttttgttttttcagctccttttatgagatgatgcaagggggaaacttgcaaacttgcacaacttgcagtctttccacacacacacacgagcgcgcgcgattgcgcgtatgcgtacattataatggcgatggattattatatcctggtaaagtaatgacatacaatccgatgagagtgtgaagggtagagtggaggaagaggtggagtggtgtgttggcttccatcttttttcctagttctaggtagtgaatggtctggttctatcctgtttttttgtaatggggggatgaagaaaatctttctggaggttatggtaaccgatgagcggtaggtgaacagcagccggcagcttttctgacggagtatctgggtattggacgggatgctatgtgcttttgtatagtttgtgtgttccgaagggttagtaacgtgtgttccgtaaggttagtaatgtgtgaccttgtacgttactaacatagaggcctgtatgttagtaacgtaccttgtttaaagtagctaggaggtttttcgcatgcaggatacgtgtcttccgcagaattatgtgaattgtattggtaaggttaaagtgtgtggttgccgcagattcagggagtcggtcctttacggtcagtgtctgttttgttctagtccttgtcttccgctttcttattttctccttgtcaggctttcctgctcttttccaccggaagtcttgtcacgtatctccctttccgccttttgcattctgttatcctttcctccgttgtagttctctccggtatcgtccgtctgtcttccgctctcttttttatgctttattatttttttatattataatgtacgcgcacgtgtgtgtgtggagatgctgcaagttttgcaagtttgcaagtttgccttccgtttttccgtcttttcttgttttccgtctgctgttttcgtatgggttccttcctttttccgtccctatacgcgcgtgcgaatattataatgtgtctgtctttttcctcccgtgtcctccgttataaaaacatgctttgtaacacatctgttattcagagtattacaaaaaagtttcaggaaatccgtataatttttccttcttatgtttgctggttatcgttaaaaggtctacctttgcatccgcaatcgagagagatgcggcacttcagacagtgtgtgactgacttggtgaaacaaacgtaggagagttttccttgacagtgtctgcacccagtatcttaccttagcggggctaagggagcgagaacggataagacgtggggaggatggacgtcccgccttttatggaagtttcgaaaaaaactttttcaaaaaaaactttcgaaaacatttggtgattacgataaaatctcttacctttgcatccgctttcggaaacgatggcaagacataaatgagagttctttgaaagatttaagataaacaaacaagtagtacaagccggtgcaccgtatataatatatatatatggtgtacggaaaaacaagaaccgtcaatattgatattgatagatttggaatccttgagcagattatcaactgaacagttggaaaaagatattattacaatgaagagtttgatcctggctcaggatgaacgctagctacaggcttaacacatgcaagtcgaggggcagcatggtcttagcttgctaaggccgatggcgaccggcgcacgggtgagtaacacgtatccaacctgccgtctactcttggacagccttctgaaaggaagattaatacaagatggcatcatgagtccgcatgttcacatgattaaaggtattccggtagacgatggggatgcgttccattagatagtaggcggggtaacggcccacctagtcttcgatggataggggttctgagaggaaggtcccccacattggaactgagacacggtccaaactcctacgggaggcagcagtgaggaatattggtcaatgggcgagagcctgaaccagccaagtagcgtgaaggatgactgccctatgggttgtaaacttcttttataaaggaataaagtcgggtatggatacccgtttgcatgtactttatgaataaggatcggctaactccgtgccagcagccgcggtaatacggaggatccgagcgttatccggatttattgggtttaaagggagcgtagatggatgtttaagtcagttgtgaaagtttgcggctcaaccgtaaaattgcagttgatactggatatcttgagtgcagttgaggcaggcggaattcgtggtgtagcggtgaaatgcttagatatcacgaagaactccgattgcgaaggcagcctgctaagctgcaactgacattgaggctcgaaagtgtgggtatcaaacaggattagataccctggtagtccacacggtaaacgatgaatactcgctgtttgcgatatactgcaagcggccaagcgaaagcgttaagtattccacctggggagtacgccggcaacggtgaaactcaaaggaattgacgggggcccgcacaagcggaggaacatgtggtttaattcgatgatacgcgaggaaccttacccgggcttaaattgcagatgaattacggtgaaagccgtaagccgcaaggcatctgtgaaggtgctgcatggttgtcgtcagctcgtgccgtgaggtgtcggcttaagtgccataacgagcgcaacccttgttgtcagttactaacaggttccgctgaggactctgacaagactgccatcgtaagatgtgaggaaggtggggatgacgtcaaatcagcacggcccttacgtccggggctacacacgtgttacaatggggggtacagagggccgctaccacgcgagtggatgccaatccccaaaacctctctcagttcggactggagtctgcaacccgactccacgaagctggattcgctagtaatcgcgcatcagccacggcgcggtgaatacgttcccgggccttgtacacaccgcccgtcaagccatgggagccgggggtacctgaagtgcgtaaccgcgaggagcgccctagggtaaaactggtgactggggctaagtcgtaacaaggtagccgtaccggaaggtgcggctggaacacctcctttctggagaggacgaaagatcgataaggtttttgttcttgtactgctggtgttgtttattcaagatatgattccgtaatgatacggaagagagaaagtaagaagccgggtctaattaaacagactaggttgaacttagtcctatagctcagttggttagagcgctacactgataatgtagaggtcggcagttcaactctgcctgggactacgaacggaatcaagttcgggggattagctcagctggctagagcatctgccttgcacgcagagggtcaacggttcgaatccgttattctccactccatcggaaacgtaagaaacgaagatgaacgatctatgacatattgtacaagcaaacagtaattttagtagtaaagagctgaaagtatatatcatcccgccggcacgcaagtgtgggcgaatggataaggaaagtaaagaagggcgcatggcggatgccttggctctcggaggcgatgaaggacgtgataagctgcgataagctttggggaggtgcaaatgacctttgatccagagatttccgaatgggacaacccaatatcttgaagaggtattatcttactatgtaagaggctaacgcagggaactgaaacatcttagtacctgcaggaaaagaaaataaacaatgattcccccagtagtggcgagcgaacggggaacagcccaaaccatccatgttacggcatgggtggggttgtaggactacgccgttgcatgaagacatcagagaagaactttctggaaagaaagaccatagagcatgacagttgcgtattcgaatgttgtcgaagcatagtagtatcctgagtagcgcggagcacgaggaattctgcgtgaatctgccgggaccatccggtaaggctaaatactcccgagagaccgatagcgaaccagtaccgtgagggaaaggtgaaaagcacttcgaacagaagagtgaaatagttcctgaaaccgtgcgcctacaagcggtcggagctcgttaatgagtgacggcgtgccttttgcataatgaacctacgagttgcctttgccggcaaggttaagtgtgacgacacacgtatccgaagcgaaagcgagtctgaagagggcgtatagtcggcagtggcagacgcgaaaccaagtgatctacccttggccaggttgaaggctgggtaacaccagctggaggaccgcaccaataagcgttgaaaagcttctggatgagctgagggtaggggtgaaaggctaatcaaacttggagatagctcgtactccccgaaatgcatttaggtgcagccttgcgggttactgatgtgaggtagagcgactgataagatgcgagggcttcaccgcctatcaagtcttgacaaactccgaatgcgcatcagttctaccgcaggagtgagggcatgggtgctaaggtccgtgcccgagaggagaagaatccggaccacctgctaaggtcccgaaatgacagctaagttaaactaacgaagtctgactgctaagacagctaggatgttggcttggaagcagccattcatttaaagagtgcgtaacagctcactagtcgaggagtcgggcgtggataataatcgggtatgaagttgtctaccgaagcagtgggatcattgatatgatcggtaggggagcattccagtcagcgtcgaaggcgtaccgtgaggtattctggagcgtctggaaaagcaaatgtaggtataagtaacgataaagggggcgggaaaccccctcgccgaaagactaaggtttcctgatcaacgctaatcggatcagggtcagtcgggtcctaaggctcagccgaacggcgatgccgatggcagaaacggttaatattccgttactaccttcaggagtgacgtggagacgcagtagtgacagtgccgccatctgacggaatagatggttgaagggtgtaggagtcgatcatggcaggcaaatccaccatgagatccgaacctgacagtatgccgcgtccttcgggacaaggcaatagtgcgcgtaagcatgctgccgagaaaatccgctaaacttaatcctgcaggtacccgtaccgcaaacggacacacgtagtcgggatgaatattctaaggcgcttgagtgattcacggttaaggaactaggcaaactgaccctgtaacttcgggataaagggtccctacccttttatgggagggcgcagagaatcggtccaggcaactgtttaacaaaaacacagggctgtgccaaatcgaaagatccagtatacagcctgacacctgcccggtgctggaaggttaagaggagatgtcatcgataagagaagcgttgaattgaagccccagtaaacggcggccgtaactataacggtcctaaggtagcgaaattccttgtcgggtaagttccgacctgcacgaatggtgtaatgatctggacgctgtctcaaccgtgagctcagtgaaattgtagtatcggtgaagatgccgattacccgcgatgggacgaaaagaccccgtgaacctttactatagcttatcattgaatctgggcacgtgatgtgtaggataggtcggaggctttgaagcaggtacgccagtatttgtggagccgctgttgaaatacgaccctttatttgtttggattctaacccgtggaacggggacattgattggtgggtagtttgactggggtggtcgcctccaaaagcgtaacggaggcttctaaaggtgccctccggccgattggtaaccggccttagagtgtaatggcataagggcgcttgactgggagactgacaagtcgatcaggtaggaaactagagcatagtgatccggtgtttccgtatggaagggacatcgctcaaaggataaaaggtactccggggataacaggctgatccctcccaagagctcatatcgacggagtggtttggcacctcgatgtcggctcgtcacatcctggggctggagaaggtcccaagggttgggctgttcgcccattaaagtggcacgcgagctgggttcagaacgtcgtgagacagttcggtctctatctatcgtgggcgcatgaaatttgcgtggctctgacactagtacgagaggaccgtgttggacagacctctggtttgccggttgtgccgccaggtgcattgccgggtatctaagtctggatcggataagtgctgaaagcatctaagtacgaagccggccacaagattagatttctcagggtcgttgtagactacgacgttgataggatgcaggtgtaaagatggagacatcaaagccgagcattactaattgcccgtccactttccttatatgtcggatggtgtatacctttggtttttactacagaatgaaattacgataacagctcaacaatatgtcaaccttattcaggtggctatagcacaagggttccacctcttcccattccgaacagagaagttaagccttgtcacgccgatggtactgcgtcacagtgggagagtaggtagccgccgttttgattgaagcctccggacttgaagaagttccggaggcttttttttgtatccgcacgtgtgtggggagtctagtaacggaaataatcctatgttctgtaacatgaatatggtatatttttctctttttgcagtacttttagtgtaaattctatcattaaattctttttctatcattgatttttgtacttttgggctattctttttgaatttattgaagaaagaaagtgttaaactcaaaaaaatatcttctaagaatatggaaaataaaattcaggagcttaccgataagatttatcgtgaaggtgtggaaaaaggaaatgaagaagcacagcgacttatcagtagtgctcgcgatgaagcagcaaagattgtagaggatgcccgtaaggaagctgagtctattctcgctgtagctcggaagtcagccaaggaaactgccgaaaatacacaatcagaaattaaattgtttgccggacaagcagtaaatgcattgaagaccgaaatagctaccttgttgaccaatgaggtagtcagtgaaagtgtgaaaggatttgtggcagataaggagtatctgaataagtttatagtttcattagctgcccaatggtctgctaacgaatctatcgtgatctctaccgcagatgccgaaggacttaagaaatattttgcagcgaacgcaaaagctttgttggataaaggagtgagaatagaagaagtgaacggaacgaaatcactttttactatctcaccagctgacggctcttacaaagtgaacttcggtgaagaggaatttgaaaattatttcaaggatttccttcgtcctcaattagtagaaatgttgttttaaaacgggactatgacaaattattattgcctggtagccggtttgccggatctttcgttggaggatggcaaactgaactatacagtggctaattttaaatcggaaatctattcggaattatcggaaaaggataggaagttaatcgacttgttctatttgaaattcgataatgctaacctgttgaaactgttgaaagataaggaagctacgacagattttgaggggaattattctcagaatgagttgctggcgcttatcagttcggtgcgtgaaggcgatgctccggataagagatacccatcttatctttatgaatttattactgcttatttggctctttccgcagaggaactctatcgtgcggaagatatgttatctgcctgctattatgcgtatgccatgaactgcggtaatcaatttgtttcctcctggtttgaatttaatttgaatatcaataatatactggctgccttagctgcacgtaaatataaaatggacgtatctcaggtagtagtgggcaagacggatgtgagtgagatgattcgtacatcgaatgcccgagatttcggtttgtccgagatgctggaatattttgagcaggtactccgtatcagcgagattgaagaattagtggaaagggaaaagaagatagatttgttgaaatggaactggatggaagacgctgtctttttcaactattttactgtggagcggattttcgtgtttttgttgaaactggaaatgattggccgttggatttctatggataaggaaaagggaagcgaactgttccgtcagattattgataaattaaaggacgagatacagattcccgcagaattcagataataaacagattaaagatatatggcaacaaaaggaactgttagtggcgtaatagccaacatggttactcttaccgttgacggaccggtggcacagaatgagatttgttacattctgactggcggagaccgcttgatggcagaggttattaaggtagtaggcagcaatgtttatgtgcaggtgtttgaaagtacacgtggattgaaagttggtgctgaagccgaatttacgggacacatgcttgaagtgactctaggtccgggtatgttgtctaaaaattatgatggtctgcaaaacgaccttgataaaatggatggagtgttcctgaaacgcggacaatacacctatccattggataaagaaagagtgtggcattttgtaccgttggtgaaagtgggtgatgaagttggtccatcggcttggttgggacaggtggatgagaacttccagccactgaaaattatggtaccatttcagttgacaggtacttataaagtgaaatccattgttcctgaaggtgattatactattgaggatactgtagtggttctgacggacagagaaggtaaagatattccggtaaacatgattcagaagtggccggtaaagaaggctatgactaattataaggaaaagccgcgtccttataaattattggaaaccggtgtccgtgttattgatacggtcaaccccattgtagaagggggaacgggatttattcccggtccgtttggtacagggaaaacagtgcttcagcatgccatctccaagcaggcggaagcggatatcgtaattatcgctgcttgtggtgaacgtgcgaatgaggtggtggaaatctttacggagttccccgaactggtagatccgcatacaggacgtaagctgatggaacgtactatcattattgccaatacctcgaacatgccggtggctgcccgtgaagcgtctgtgtacacggctatgaccatttctgagtattatcgtgctatgggattgaaagtcttactgatggcagattctacttcccgttgggcgcaggccttgcgtgagatgtccaaccgtatggaagaattgcctggtccggatgcattcccgatggatatctcggctattatctccaacttttacggacgtgcgggatatgtacatctgaataatggtgagaccggttctattacctttatcggtactgtatctccggcaggtggtaacttgaaggaacctgtaacggagaatactaaaaaggtggcccgttgcttttatgccttggagcaggaacgtgccgacaggaagcgttatccggctgtgaacccgattgactcttattcaaaatatctggaatatccggaatttgaggaatatatcgccaaacgtattaatggtgaatggattggtaaggtgaacgaaatcaaaacaagattgttgcgtggtaaggaaattgctgaacagattaatattttgggtgatgatggcgtacctgtagaatatcatgtaatcttttggaaatcagagttgattgattttgtgattctgcaacaggatgcttttgatgaagtggattcagtgactccgatggaacgtcaggaggagatcttgaatatggtaatcgacatctgtcatacggaattcaagtttgatactttcattgaggtgatggattatttcaaaaagatgatcaacctttgcaaacagatgaactatgctaaatataaatctgagcagtatgaggattttaagaagcagttacaggaattggttgccgagagaagtgtctgattttaatttttaattttaatttataatgagtagagatggcaacaaaagcatttcaaaagatatatactaagattagccagattaccaaggcaacctgttcgctgaaagcgtcaggagtgggctatgatgagttggcaatggttaatgggaaattagcccaggtggtaaaaatcatgggtgatgaagtgactttgcaggtgttcgagggtacggaaggtattccgaccaatgctgaggtcgtattcttgggcaagtcgcctacactgaaagtgagcgaccagttggctggacgtttcttcaacgcttttggtgatccgattgatgggggaccggaaattgagggacaggaagtgcctatcggcggtccgtctgtgaatccggttcgccgtaaacagccgtcggaactgattgcgaccggtattgccggtatcgatttgaacaatacgttggtatcaggacagaagattcctttttttgctgaccctgaccagccgttcaatcaagtgatggccaatgtggcattgcgtgccgaaaccgataagattatcttgggtggtatgggtatgactaatgacgactacctgtattttaagaatgtattttctaatgccggtgcgctcgaccgtattatcagtttcgtgaatactacggaaaatcctccggtagaacgtctgttgattccggatatggcgctgacggctgctgaatattttgcagtggaacataatcagaaagtattggtgttgctgactgatatgaccagttatgctgatgcgttagctattgtgtctaaccgtatggatcagattccttccaaggactctatgccgggatctctttattcggatttggcgaagatttatgaaaaagcggtacaattccccgcaggtggttcaatcactattattgcggtaactaccttgagtggcggtgatattacgcacgctgttcctgataatacgggttatatcactgaaggtcagctgttcctgcgtcgcgatagtgatatcggtaaggttatcgtggacccgttccgttcgttgtctcgtttgaaacagttggtgagtggtaagaaaacccgtaaggatcatcctcaggtgatgaatgctgctgtacgtttgtatgctgatgccgccaatgccaagactaagatggaaaatggttttgacttgactaattatgatgaacgtactttggcattcgctaaagattacgctaatcagttactcgccattgatgtgaatctggatactactgaaatgctggatgttacatggggattgttcagcaaatactttaagccggaagaagtcaatataaagaaagaattggttgaccagcattggaaaaaacaataaattaacgaagaaacatggcaataaagtttcaatataacaagacctcgctacaacagcttgagaagcagctcaaggtccgtgtgcgtacgcttcctattattaaaaataaggaaagcgccctccgcatggaagtaaagagatgcaagacagaagctgccgggttggaggaaaggcttgaaaaacagattcaggcatacgaggccatgttcgcactttggaatgaatttgatgcttcattaataaaagtgagtgatgttcatttgggtataaagaagattgccggtgtacgagttcccttgttggaaaacgtagactttgacatccgtccctacagtctgttcaacagcccgaagtggtattccgatggaatatatttgttgaaaggattggcacagactgctattgaaagggaatttatgcttgccaaactgaacctgctggaacatgcgcgtaaaaagaccactcaaaaagtgaatctttttgagaaagtgcagatacccggatatcaggatgctctgcgaaagataaaacgatttatggaggatgaagagaatttgtccaaatcatcgcagaagattctgaaatctattcaagagaaaagaaaggaggcggaggcatgattacaaaaatgaagaagttgactttccttatttatcataaggactatgaatgtttcctgcaaaatatccgtgatttgggcgtagtccacgtggcggaaaaagcgcaggggacagcggagaataccgaacttcaagagagcatccgtctgtccgaccactatgcttcaactattaagtttttgcaaggttttaatgttgaactgcaagaacagaagggggatacagcccgtggagagaaagcgttggaggaagtggaggcgttacaactggagaaaacccagttgcagcatcagttgcagatttgcgacaaagagcgtgccgcgttagaggtatggggagatttcgatcctgcgtcggttatgcggttgcaagaagttggatatcaggtgaatttctatatttgctcagagaagaactttaacgaggaatggttggatacgtactatgctacggaggttaaccgtattggttcacgcatttatttcattaccataaccaaagaaggaacgttgcccgaattggaagtggaatcggtcaaattgccggtaatgtccttgagtaggcttgctgccagatgtgaagatttggaacagcaaatgaagagtgtggatgataagttagctgccatagcaggagaaaaacttctttctttgcaagttgcacaagctaatatccgctcacagatagaattctcaaaagtggtgctaagtactgaacaagctgcggatgacaaattgatgttgttacaggggtgggcaccggctacgcagattccggagattactaattttctgaatcaacaggaggcgtactttgaaattgctgaccctacgccggaggacaatgtacctattcagttgaataataaaggattcttccgtctgtttgaatcgattatgaaactgtatatgcttcctaagtataatgaactggatttgacgccgttctttgctcctttctttatgctctttttcgggctgtgtttgggcgattcgggctatggtctgttcatggtattaggagtaactgtttatcgtatgttggcgaagaatgtcggtgcttccatgaagcccatcttaactttggtgcagattttgggtgcttctactttcttctgcggtatgctgacaggtacttttttcggatttaatctgtatggtaatgatattccgttctttaataagatgcgtgatttgttcttcctggacaatcaatggatgtttaatctttcattgattttgggagcggtacagattattttcggtatgatactgaaagcggctaatcagaccattcagttcggattgaaatatgcattgtcaactatcggatggattattgtattggtaagtacagctttggcattcctattgggagataccatgccgatgggaggaactgtccatttggtaattctggggcttgccggtgtgctgattttcttgctcaacagtccaggaaagaatatttttctcaatatcggtttgggtttgtgggattcctacaatatggcaaccggtttgctgggggatatcctttcgtatgtgcgtttgtttgctttaggtctgtcgggtggtattcttgccagcgtattcaatagtctggcggctggaatgagtcctgataatgcaattgcaggtccgatagtgatggtattgattttcttgataggtcattctatcaacatgtttatgaatatattgggagcgatggttcatccgatgcgtctgactttcgtggagttttttaagaattcgggttacgaaggagggggtaaggagtacaagcctttcaagaattgaagaatgagaataaagaattaaaagctgtttaagccttttcggcattgtcattttgaataaatgttgtatccttgtgcagacagaaaagctagaaagggagaatctgaagcatagtatgcagatatttcgctaagttctggatgacatgaaaagtattccttttaggagaagtttgataaaataaagaatttaaaaattaaaaatagaagaattatggaaatgaatttattgattgcttatgtaggtattgcaattatggttggtttatcaggtatcggtagtgcgtatggtgtaactatcgcaggtaatgcatctatcggtgcattgaagaagaatgatagtgcattcggtaacttcttggtgttgactgcacttcccggtacacagggactgtatggttttgccggttatttcatgttccagagtattttcggtgttctgactccggctattacaggtattcaagctgctgccgtgttgggttccggtattgctttgggacttgtagctcttttctccgctatccgtcaggggcaggtttgtgctaatggtattgctgccattggccaaggacataatgtatttggtaatacattgattttggccgtttttcctgaattgtatgctattgttgctttggctgcaaccttcttgatgggatctgcattggctgcgtaatcagattagtttttttatatgggcggttatttcctgtttttatggaaatagccgcttttcttattctaatgtaaggcagaaccttaaaaatatttattattgtagccgatatcagtatttttttgtgaagattgttagagtaaaataattgaatgctaattcagaaactatctgaataacataaagttgcaaaaaaactttattatctcattgaaaatatgtaactttgcgctcgaattaagattagttaatagatggcaaaagaattgttagcccctgattatatattcgaagcaagttgggaggtatgtaataaagtagggggaatttatacggtgttgtccaccagggccaaaacactgcaggaagcattcaaagacaaagtctttttcataggacccgatttttgggcaggaaaggaaaatcctttgttcagtgaaaatgaaaatctttgtgcggcatggcgtgaacatgctttgaagaaagacggattgaaagttcgtgtgggacgctggaatattccgggagagcctattgtcatattggtggatttttatccttttttctctaaaagaaatgaaatatatggccggatgtgggaggatttcaaagttgattcacttcatgcttatggagattacgacgaagcgtctatgttttcttatgcagccggaaaagtggttgaaagcttttatcgtttcaatctgaccgaaaatgataaggtcatttatcaggcacatgaatggatgacaggtatgggggccctttatttgcagaaagcggtacccgaaatagctaccatttttactactcacgctacttctataggccggtctatcgccggaaacaataaacccctttacgattacttatttgcttataatggcgaccaaatggcgcgtgaactcaatatggaggcaaagcattctattgagaagcagactgcgcatcatgtggattgctttactacggtcagtgagattaccaacaacgaatgcaaggagttgttggacaagccggcagatgtggtgttgatgaatgggtttgaggatgactttgttccgcaaggtcgtacatttgccgccaagcgtaagaaagctcgtgctgcgatgttgaatttggctaataaattgcttggcttgacgatgagcgatgatactcttattgtgggtacaagcggtcgttatgagtttaaaaataaaggtatcaatgtctatttggagtccttgaaccgattgacccgtgataaaaatttgaaaaaagaggtgctggcatttattaatgtaccaggttgggtaggggatcctcgtgaggatttggtggaacgtttgaaaagcaaagagaatttcacaactccgttggagtgtccgtttatcacacattggttgcataatatgagtcatgatcaggtacttgatatgatgaagtatttgggaatgtccaattcggcggaatctaaggtaaaagtaatatttgtaccttgttatctggatggaaaggatggtatcttgaatttggaatattatgatttggtgttggggaatgacttgagtgtttatccttcctattatgaaccttgggggtatacacctttggaaagtgtagcattccatgtacctactataacaactgatctggccggatttggtttgtgggtaaactcgttgaagggtagatacagtgagttgaaagatggtgtgaaagttatccatcgctcggattacaactattctgaagtggcggatgttataaaggacactatatcggaattttcgggattgccggaaaatacaatcaagacagtgcgtaaaaatgcggcggacattgctgaaaaggcattgtggaagcattttatcaaatattattatgaagcttatgatgtggcattgcataatgcacagaaaaggcttgttatgaatagctaattaattattaataaataatttgagagacatgaaaatcaaagtaagtaatgcgaatactcctaattggaaggaagttacagtaaaatcacacattcccgaagaactgaagaagttggaggaaatggctcgtaacatctggtgggcatggaattacgaagcaacagacctgtttagagatttagatcctgcaacttggaaagaagtggggcagaatcccgttgctttattggaacgtttgagctatgaaaagctggaggcattaactcaggataaggtgattgtaaagcgcatgaatgatgtatatgctaaattcaaagcttatgtagatgctaagccggatagcaaacgtccttctgttgcttatttctgtatggagtatggtttgacacatgttttgaaaatctattccggtgggctgggtattttggccggtgactacttgaaagaagcatcagacagtaatgtagatatgtgtggtgttggcttcttgtatcgttatgggtattttagccaaagcctttcaatggatggtcagcagattgctaactatgaatcacagaatttcggtagcctgcctattgaacgtgtaatggatgaaaacggacagccgatggtagttgatgttccttatttgaactatttcgttcatgcatacgtatggaaggtaaatgtaggacgtgttcctttgtatctgctagatacggataatgaaatgaacagcgaatttgatcgtcctatcacttatcagttgtatggtggagattgggagaaccgtttgaaacaagaaatcttgttaggtatcggtggtgtgttgctgctgaagaaattgggcattaagaaagatgtctatcattgtaatgaaggacatgctgctttgtgtaatgtgcagcgtttgtgtgattatgtagaaagcgggctgacatttgaccaggctttggaagtagttcgttcttcttctttatatacggttcatactccggttcctgcggggcatgactattttgatgaaggcttgtttggaaaatatatgggtggttatccacagcgtatggggatttcttggcaggatttgatggacttgggtcgtattaatccgggtgatgcaggtgaacgtttttgtatgtctacatttgcttgtaacacttgtcaggaagtaaacggtgtgagctggttgcatggcaaggtttctcaggagatgttctctggaatttggaaaggctatttccctgaagaaagtcatgtaggttatgtaactaatggtgttcatttcccaacgtggagtgctactgaatggaagaagctatatgctaagcattttgctcctaatttcctggaagatcagtctaatgagaaaatttgggaagctatttataatgtagccgatgaagaaatttgggaaacccgtatggctttgaagtacaaattggttgaccatattcgtaagcagttcagtgaaagctggttgaagaaccaaggtgatccttcacgtatcgtttctctgatggaaaagattaatccgaatgccttgttgattggttttgcccgtcgttttgctacttacaaacgtgcgcatctgctgtttactgatttggaacgtttgtctaagattgtgaacaatcctgattatccggtacagttcttatttgcaggtaaggctcatccacacgatggtgcaggtcaggggttgatcaagaagattgtggaaatttcccgtcgtccggaattcttgggcaaaatcatcttcctggaaaattatgatatgcagttggcacggcgtctggtctcaggtgttgatatttggatgaatactcctacccgtcctttggaagcttctggaacatcaggcgagaaggctttgatgaatggtgttgttaacttctctgtgcttgacggttggtggctggaaggttaccgtgaaggagcaggatgggcgttaactgaaaaacgtacttatcagaatcaagatcatcaagatcaattggatgccgcaactatttatagtattttggaaaatgagattcttccattgtattatgcacgtaaccgtaagggatattctgagggttgggtgaagactatcaagaattctattgctcaggtggctcctcattatacaatgaaacgtcagttagacgattattatgctaagttctatactaaagaagcaaaacgttttaaagaattggtagccaatgattatgcaaaggctaaggaactggctgcttggaaagaaagagttgcagaactttgggattccattgaaatcgtttcatgtgaaaagacggaagagctggctagcggtaatattgaaagcggaaaagaatatatcattacttatgtcatagatgaaaagggattggatgatgcagtaggtattgaactggttaccactttcacgaatgcggaaggtaaagagcatatctattctgtagaaccaatggaagtaattaagaaagaaggtaacttgtatacattccaggttaaacacagtttgtctaactcaggcagcttcaaggtggcataccgtatgttcccgaagaatgttgatttgcctcatcgtcaggacttctgctatgttcgttggtttaactaatcattgaattaagataatatttctatttaaagaactgtttccttggaaaagagaggaagcagttcttttttattagtatgttcgcccaaagtttcattgatattatcattctagttaagattgttatggaaagtgcgcattattgggaaggataggacgagtataaaaaataccgatgcctttctagacatcggtattttactttgtaaactattttgcagttattttatttcaatagttcgttcagtttggacttgatggcatctccacggagattacgtgcaacaatggtaccttcctgatcaaccaatacggtagcaggaattgaattgacaccataaagttttgcacctgcattgttccaaccttgcaggtcagacatttgcggccatgtaatattcaaggcagtgatagcctctttccacttgtctgcattctcgtctaaagaaatacctacaattccgaagcctttatctttgaaagccttgtatgcttctacaacattgggcatttctttacggcaaggtccgcaccagctagcccaaaagtcaatcaaagtatatttatttttgctgacgaaatcagacaggcttacagttttaccttcaggggtctgcatagagaaatcaatgtatttctgacctacagccgttttctctgaagtttcaatgtgggctttcaacttgttgatacgttcattaactaatgcagcgggaattttttctaccaacgctttttgtttgtcgagttcgaatgcgcctgcataggaagggagaagatatacaccgaccggattggtgatattggcttcaattgtttgataaaccatatccatgcctacactgtctttcttttcaatctcagccatgatagcttctacctgttcttctgtcaagctagtgtcgctttgagccttttggtacatttcattcatttccttgcttaaagccatgaagccatctttgaatttttggtaagcgtcgttattaggagtacctgaaactttgctttccttacctaaggttacattaatatttccattttcaagaaaaagatcagtaaagtaacgcttgtctcctttcatataagtgatgtagcggtttacagccgtatcttgttttccggtgaatacgaaagttccgcttttgacaatagcagaatcaagttttacaaggtttcctcctgcgtattcctgtaaatagatcgtgtcgccatcagtgatgtcttctactgaacctgtaaccttataggaaggcgaattctgacatgcaacgaaagccatacttcctgcagccaataaataaactaattttttcattttaatatgattataatttgaacgcaaagataactacttaattaatatgtttgcggaaaaaaggtttttattttcagaatgaaataaggaatctatagttttgctttgctttttttgaattttatgggcactcattcaattcctttggttataatttgtacagggggctgccttactgttacagttgatcggtaatattctggatctttcgaaaatcgaatcgggcacattgaagtttgtgtagagtgatgtgaatattaatgcaatgatgtacgatttggaggaattatttcaattacggaataaaaataatccggaggtggagatcgggtagatgttgaatccgagcagggagaaggtctcatttttttgtttacaatttctcaaaagcctatcattcactttgctgggagaagagaaatagtacgcacaatggaaaattattagtcggatgaataaatattactttatttatatcctccattcttgaaaaataccgtaattttgcaactcaattacaaaatgagtatgcaacaatctaattatataattgaggtaaaaggtgtttccaagttttttggtgataaaatggtcttggataacattaatttatatgtaaaaaaaggtgagtttgtaactgtgttggggccctccggttgcggaaagacaactcttttacgtttgattgccggttttcagactgcttcggaaggcgagataaagatagctggaaaagagatcacgcagacacctccgcataagcgtccggtaaatactgtgttccagaagtatgctttgttccctcatttgaatgtgttcgataatattgccttcggattgaaattgaaaaagatctctaagcagactatcgagaagaaagtaaaggctgctcttcgtatggtagggatgacggactatgagtatcgggatgtgaattccttgtcgggcgggcagcaacagcgtgtagccatagcccgtgctattgtcaatgagccggaggtgttgttgctggatgagcctttggctgctttggacttgaagatgcgtaaagatatgcagatggaattaaaagagatgcataagacattgggcatcacttttatttatgtgacgcatgaccaagaggaagctttaacactgagcgacacgattgttgtaatgagtgaaggaaaaatacagcagatcggaacaccggtggatatttataacgaacccatcaattcgtttgtagctgattttataggtgagagcaatattctgaacggaactatgatacaggacaagcttgtgcgttttgcaggagtggaatttgaatgtgtagatgaaggtttcggtgaaaatatgccggtagatgttgtggtacgtcctgaagattggtatatttttccggattcggatgcttcacagatttcaggtatcgtaacctcatccatctttaaaggtgtgcattatgaaatggtggtcgaggccaatggttatgaatttattgtacaggactatcatcattttgctgtgggtgagcaggtaggtttgttgataaaaccttttgatatccatattatgaaaaaagaacgtgtatgcaatacgtttgaaggagaactgacagatggaacgcatgtggaatttctgggatgtacgtttgagtgtctgccagtggttgacattgagccgggaactaaagtaaaagtgcaggtagatttcaaggatatcattttgcaggataatgaagaggatggaactttaaccggagatgtacgttttatcctatataagggagatcattatcacctcactgtgtcatcggactggggtgaggatatttttgttgataccaatgatgtatgggacaatggtgatcatgtaggtatcagcatctttcccgaaagtataaaaataactcagattgtagaatcataataaagaaaagaggtgctcagaacgatacgatttttcttgtcttcacgtaaaagttggactattccttacgtgatattttcggcggtatttgttattcttccgctacttttaatagtggtttatgcatttatggatgatgcggggcatttcacattgggaaattttgccaaatttttcgcccatcccgaggcaatcaacacatttgtttattctattggcgtggccattatcacaacagtggtatgtatcttattgggatatcctgctgcctatattctgacacagatgcggatgaaatatgcatcgacagtggtggtattgtttattttgcccatgtgggtgaatattttaatacgtacactggctacggtggccttgttcgattttatgaacgtatctttaggagagggggctttgatattcggtatggtatataattttttgccttttatgatttatcctatttacaacactttgcagaaattggataaaagttatgtggaagcggcgcaagatttgggcgccaatcccatgcaagtgtttttcaaggctgtgttgcccctgtctatgccgggtattgtgagtggtatattaatggtatttatgcctactatctccacatttgctattgccgaattattgacaatgaataatattaaattatttggcactactatccaggaaaatattaataatagtatgtggaattatggggcggccttgtcgttgatcatgttgttccttattggtgcgacaaccttgctcgcttcagatgataaggatcataacgaaggaggcggactatggtaaagaaaattttgtgtcaggggtatttgtggctgcttctgctattgctttatgcgcctatttttatcattatgatctattcgtttaccgaagcaaaggtgctgggcaactggaccgggttttccaccaaactctattcatccctatttgttgcaggtacacatcattcattgacaaatgccttggtcaataccttgagcattgcctttattgcagctaccgtatccaccttgctgggcagtattacggcaatcggcatattcaatcttcgtccccgtgcccgtaaagcaatcagttttgtcaataatattcctattttgaatggagatattattattggtatatctctattcttgctgttcgtatctttgggtattccacaaggatataccactgtagtgcttgcacatatcacattctgtactccatatgtggtgttaagtgtgttgccgcgtttgaaacagatgaatccgaatatttatgaggcggcgcttgacttgggggctactcctatgcaggcactccgcaaggtgattgttcctgagattcttccgggaatgatttcaggttttatgttggcggtgactttgtccattgacgattttgccgtgactgtatttactattggtaatgaagggcttgaaactctttccacctatatttatgcggatgcacggaaaggagggttgacccctgaacttcgtccgctttctaccattatattcgtattggtgctggtattgctggttatcatcaatcgccgtgcaggcaagaaaaaggaggtataaaaaatgaggaaaataaatagatggctgatggtgtgtgtgtgcgcgttattctctttaaccggatgctataacacagagcctcgtgagagtgtgctgaaaatatataattgggccgattacattgatgaggatatgttggcggaatttccccggtggtacaaagaacagacgggggaagatattcggattgtctatcagacttttgacatcaatgaaatcatgttgaccaagatagaacgcgggcatgaagattttgatgtagtttgtccttcggagtatatcatagagcgcatgctgaggaaaggtttattgcttcccattgataccgtttttggaaagacccccaattatctgcataatgaatctccttatatccgtgaacaattggataaattgagctggtcggggcatcgtgcttcagattatgccatcggttatatgtggggaacagcaggtatcctttttaataccgatcatgttccagcggaagatgccaggacttgggccagtctttggaatctgaaatatgagaacaagatcctgatgaaggaaagttatcgtgatgcatatggtaccgcattgatttatgccaatgccgaggatttgaaaaaaggcaaggttacggtagaggagttgatgaacaactattcgcaagcatccatcgatacagttgagaagtatctgaaagccatgaaacccttaatagcaggttgggaagctgattttggcaaggaaatgatgactaaaggtaaagcatggctgaacatgacctggagcggggatgcggtatgggcgatagaagaggctgaaggagtgggtatccatctggactatgaggtgccgatggaaggaagtaatgtgtggtatgacggatgggtgatccctaagtatgctagaaataaaaaggctgccagttattttattaattatttatgccgtcccgatgtggctttacgtaatatggacgcctgtggttatgtgagtgccgttgctactcccgagattttggaggcaaaaatagatactactttatcttactttgcagatttaagctattttttcggtcctgctgccgatagtatacaaatagataaggtacagtatcctgaccgtacagtggtggagcgttgtgccatgattcgtgattccggtgacaagaccgaattggtcttggaaatgtggtcgcgtgtaaagggggataatttgggggtaggcgtggttattgtgattctggtatctgccgggattatggtagtattcaccgtgtatagaaaacttcagcgttatcagcatgaaaaggctcaatatcctcgcaggaatcatcgaagaaagaaatgactttataagggaaggaaacatttagtcttgctgataaaacgatttagggaatccaatctttaggtagggatattcagtaaatgtctctaaaaaataagatggcatatgaagatgatagggcatgaccatttcatatgccattcttatagtcatttttccgtgctttctcacatacttctatccgacaggacatgacgttccggaagaagtctgatgacctcttctgattctgtgagtaaaatcatatcatgctgctttagctgttttgtttctgattttttctatcatcagtatggcatttgccgtatgtattccaaagaaaatccacagtatttccgtcttcctgtttctggcctttatccttgagagcgagtaatgttgcttttgagtgccgaagcttccttcaagccgtgttgccctttcttttgagagttcgcttctaagcaccttcctcaaaggctcatctttggccgcccttcccttgcgcacaaaggatgtggatatcccatattttgtacagaactttctgttggcattattggcatatatggaatcggcagccacacatcttacccttacattcataagcttctgctgcatacggatacagtccttcaagcgtataccctcattgaatgccttgaacgagaggtgttcgatgaacgatatgccgtctatctgtatattattgacctttgcaccgaactcgacggacttggtttccttgcctctgacgatgggacgtacataatgacggtcaatgctgacgatgcggtcactgactttccgcccttcaaacatttccttttcttgtacaagcacctttctgatgatggaaagacgcttatgataatcctgggtatatcggagtaaagcaccgtactcgctatggatcccatccctttgactgaggagcttttcaagaagcttgatcatacggcgcttaagcattcttgtccttgaagctctcctctttcttttcttgcagtaggacagataggattccgccacattcctgtatttgttgcgcggacgccttatgcccagctccctgcaatgccggcatatatgcctgtagagccattcgaggctttcccaaaggagtttcatgtccgtaggaaaacgcatgtggctttcatagcatgtggcatcggtcatgcagacgtgaaggttatcaagataaggtttccagtgtgaagccaggagctcctggaaagaatcaatgtcaaggcgggatgctatctcattacggatggcactgactatcttgaagttggttatgggaagggacgggggaatcataattccacagaaaatctggtagtgtatgttcccgttcagatgttccaccagttgcctgtcggagaatccggtgtatgccttcaggaccataagggcgatctttgcggaaggactgaatctgttcctgcgtcccaggcgccggtccgacaggccggcggcttttgccatacattcaaacggaaagaccgaatgaagcttgccaagctcactctcattaaaactcttgcggtatttttccagaatatcaaattctgtaaaacccaaagtagggtgaatttctgaaatattcactatctttgccatatcttattagtttggatatttcccccgttttggccgtcaaatcttattttcgggggaatacctaaagatacaaaaaagccaactaattcgcaatactttgtgtatgaattagttggctgattttgtaatatttaatgaatgtccctaggtagaattaaaatgggatattcagtaaatgtctctaaaaaataagatggcatatgaagatgatagggcatgaccatttcatatgccattcttattgtcatttttccgtgctttctcacatacttctatccgacaggacatgacgttccggaagaagtctgatgacctcttctgattctgtgagtaaaatcatatcatgctgctttagctgttttgtttctgattttttctatcatcagtatggcatttgccgtatgtattccaaagaaaatccacagtatttccgtcttcctgtttctggcctttatccttgagagcgagtaatgttgcttttgagtgccgaagcttccttcaagccgtgttgccctttcttttgagagttcgcttctaagcaccttcctcaaaggctcatctttggccgcccttcccttgcgcacaaaggatgtggatatcccatattttgtacagaactttctgttggcattattggcatatatggaatcggcagccacacatcttacccttacattcataagcttctgctgcatacggatacagtccttcaagcgtataccctcattgaatgccttgaacgagaggtgttcgatgaacgatatgccgtctatctgtatattattgacctttgcaccgaactcgacggacttggtttccttgcctctgacgatgggacgtacataatgacggtcaatgctgacgatgcggtcactgactttccgcccttcaaacatttccttttcttgtacaagcacctttctgatgatggaaagacgcttatgataatcctgggtatatcggagtaaagcaccgtactcgctatggatcccatccctttgactgaggagcttttcaagaagcttgatcatacggcgcttaagcattcttgtccttgaagctctcctctttcttttcttgcagtaggacagataggattccgccacattcctgtatttgttgcgcggacgccttatgcccagctccctgcaatgccggcatatatgcctgtagagccattcgaggctttcccaaaggagtttcatgtccgtaggaaaacgcatgtggctttcatagcatgtggcatcggtcatgcagacgtgaaggttatcaagataaggtttccagtgtgaagccaggagctcctggaaagaatcaatgtcaaggcgggatgctatctcattacggatggcactgactatcttgaagttggttatgggaagggacgggggaatcataattccacagaaaatctggtagtgtatgttcccgttcagatgttccaccagttgcctgtcggagaatccggtgtatgccttcaggaccataagggcgatctttgcggaaggactgaatctgttcctgcgtcccaggcgccggtccgacaggccggcggcttttgccatacattcaaacggaaagaccgaatgaagcttgccaagctcactctcattaaaactcttgcggtatttttccagaatatcaaattctgtaaaacccaaagtagggtgaatttctgaaatattcactatctttgccatatcttattagtttggatatttcccccgttttggccgtcaaatcttattttcgggggaatacctaaagatacaaaaaagccaactaattcgcaatactttgtgtatgaattagttggctgattttgtaatatttaatgaatgtccctaaaataaaagtccgaacttgggaaagtccggacttttatttctataatcatataaagattaaatgatgtattgtgaagagatagactcattattcatcacgcggcggattgtttcagcaaacatatcagcaatggtcagttgcttcactttagagcaacggttagcataaggaatactatcggtaaataccatttcttccaagccggagttctgaacgcgttcggatgcaggacctgacattacacagtgagaagcgatagcgcggacggaaatagctcccgcttctttcataatatcggcagctttggtaatagtacctgctgtatctaccatatcgtcaattaagatgacatttttattttttacatcaccgataatttgcatggtggccacttcattggctttcaggcgcgtcttgttgcagagtaccaagggtacacccaaatatttggaataagtgctggcgcgttttgaaccacccacgtccggagttgcgattaccaagtcttccagttgcaatgattcaatgtaaggcaggaatacgccagaagcgtagaggtggtctaccggtacatcaaagaatccttgaatctgatcggcatgcaaatccattgtgattaaacggtcgatgcctgctacgctcagaagatcggctaccagtttagcaccgatagaaacacgaggtttgtcttttctgtcctgacgtgcccatccaaagtagggaataacggctacaatgctttttgcagaggctcttttagctgcatcaatcattagcagcagttccattaagttgtcagagttaggaaaggtagattgaactagaaaaacatgtgcgcctctaattgattcttcataagaaacagcgaactcaccatcagcaaaatgcatgatgttcatgtttcctaatttgcaaccgaggctgttgcaaatcttttctgcaaggtatctcgaatttgttcctgagaataccctaaaaggtgatgttttgctcatttttgtaatagatattacctatttgttaatttgcgtgcaaaggtacgtattataattagaaattaaaaatagaaatttaaaaataacttctcattattgtaatatgcttggtttgaagcatattcttcgttttttaggcttctattctaaattattttgataaatcagtctgctaaatctcttaatttccggaaatgttctatcacgcaccgataatcgcgatcggtacacgcatcgaatttattccaaagggcgcccaatatggcggctcctccgaaaccaaagtcctttacctccagcaagttttcttcgtcaatgcctcccaaagctatgacttttttgtcaataatgcctgctttggcggcggtacggagttcttcggcggtgtatgccgagttataatttagtttggatatgctattgaataccggactcagaaagacataatcgcaactggatttgcgctctttaacttcgtctagcgaatggcaagaacaactgacatgtcctttgtatccttccggcaggttcggattacgaccgttcaggtgaattcctttcagtttgtattcctctttcagataaaaatgtccgtgaaccacgatgcgtttgtgatattgttcggggataagggttagcagacgttctgcaaacatgggtgctgtaccgggctttcgcagatggagtgtgtctagtccctcctcgaaaagagctgtaattattttatcttcctccacaaaataagtggggggcgttattagaattaacttcataccttatgactaattgctaagcaaagatagcaacctatttgtaataatcctagtggatttatagatttatttttgataaacctgtaaatcaatgggatactttccccgaaaaagtgattcatgcgatggaaaagttttaaataatctgtgtgtatctgtatgaaataggcgttttttatttacttttgcgctaataaaacaagacgaatagatagaattatgaataaaaaacaatttcttgcagccgcattttgtttgatggcacttgccggatgtacgcaaaaaacggaattgcctgagaatcctaaagatcaagaagagtaccgtgatcatcagggaaacagttggatttataacgctatgctaatgcgttgggcattaatgccgtctatggccaacggactttctaccacacattattattatcctaaatctgattcgtggacagatgctaacggaatgaaagtggatgctccttcaaaagtgaatgtgggggcaaaatcgtctacaaaatcaaaatcgagcggaagtgtttttgggaaaacacgccgttcatccggtgttcatagttaataggaagcggatatgaaaagaatacctgttacgccacgttcagactaccgtgagaaaatagaagtgctgggctttgattttcatggtgattattggcgcgaggaagcgtattatcgttttacggctgaagaaacagcctgtttggaggaagcaaccaatgaggcgtaccgtctgtattgtgaggctgctcaattcattattgaagataacccggaatttatggagcgtgcattgaatattccgaaggagattggtgagcgtatccgtgcttcttggggtgcggatgagttaagtctgtatggtcgttttgattttatattagccaaggatggtactccgaaaatattggagttcaatgctgatacaccgacttctttgcttgaagcatctgttatccaatggcaatggaaagaggatgtttttccggaatgcgaccagtttaatggtattcatgaaggattggtgcagtcatggaaagatattttccccaaaaaaggagagattcattttgctggtgcattagagaataatgaagatacaggaacgttgcaatatctggcaagtacggcgatggaggctgggttttctacccgagtattggatatgcaggcgctggatttgcaaaatggacgattttttgatccggcaggtgaactagtgaaccggtgctttaaactttatccgtgggagtggatggtggacgaaagtcctgacggatgtctagcggaaatggaatggttggagccgatatggaaattggtgatgtccaataaggcgatccttgccacattgtacgagttgtttccggattctccttatgtgcttccttgttatttgtcgcgccctcggtcgggattgttttgtaaaaaaccgatcttctctcgtgaaggtcataatgtaagcgttgttgatatccgggattgggaggaatatgtacgtatagctgaaacggagggtgattataacactggagcttatgtatatcaggagtatgtggaaccgacagcgtacagtggcagatatccagttattggttcttggattataggaggagaagctgcgggcatcggtattcgcgaaaatcgtatggaggttacagataacttgtccgagtttgtaccacatattataggataaagtcaaactattcatgtgccggtcgatgccggacgacggatgtcgtcatgcctcgactgttggcacataattgaggaattaatgtcttttgaatagggtcggttcgattcctctagaaggaaatgagatgggtttccatcgtttttacgttaatcgtccataatttgccgcttaacacttcgccatattcacctataatcttcaacacttcagcagcttcggcacaacctattatgccgggggttacacctaatactcctttgggcggatggggcatggatagcatttctgtttcgtcggggaaaaagtggcggtaatcggggcctccttggtaattgaaaacggatacttgaccttcgaaggcacggatggcaccatatacataaacttttccccatttcacacagatgtcattgataagatagcgggtagcgaaattatcacatccatctataatgatgtcgtaggtacggataatttcatccgcattctctttagtcagtcttgtgggataggcattgatttgtacatcatggttcagggcttcaagacgtttcttggcttggatagctttgggcatgcctacctcggcttcactataaagtacttgacgttgcaagttgctgacacttaccacatcatcgtctattaatccgatggtacctactccggctcctgtcaggtacaaggcaacaggagaccccagaccacctacaccgacaataagcactttggcctgctgaagccgttgttgtcctttttctcccaattcagggagaataatttgacggttatatctttccactttgtttgttgttaatttgaaaaaaaggagctttgtatcatttatacagccccattcctttaaaaatatgggtaaaatctatcgtattggcgtgaacttgtcaaaagaaacatcccagtctttccataccggctcccttcctaatgatttcagtgcgtgttctacttctacggctgtacgctcatcacttacatggaattgttccaaagcttgcggataggtatagtatccccccggttcagttttgctttcagcactcatggtagtcactcctagccctgccatgttgtcgcggatttgtgccggttcacgagtggagtaggagatatctacatcgtgatcgaaaatacgcatggcaaaagtgagctgtgccaactcacgatcattcatgatgacattcggctggaaaccaccgttttctgccggacgcatacgggggaagttgacactgtatttggttttccaatactttttctgaagatagcgtaagtgataagccatcatggtcacatcggtgcgccattcttccagtccgataagtactcccatgccgatggagtggactcctgcctgacccatgcggtcgaagccgtttacccgccactcgaatttggatttcatcccgcgtgggtgatatatattataacgggctttgttataagtttcctgaaagcaaatgactccattcagtccgtgttctttcagttcggcatattcttcggctttgaggggcattacctctatcttcagattgctgaaatattttttggcgatgtccaaagctttagccagataagggactccggcttttgccggattctctccggtcaccagtaacaggttctcaaaaggccccagtttcttgatggctttgtattcatcttcaatctgttcgggggtgaggatggtacgtgccatcgggttgctgatatggaaaccacaatacacacaagaattggtgcaggagttggtgatatacagcggtataaacatggagatggttttgccgaaacgttcttcggtatattttttgcttagttgcgccatcggctccaggtattttgctgctgcgggggagatgagcgccataaagtcgtccacatcgcaatgttccttgccaagagcgcggagcacatcactttcggtcttggagtagatggttttggtggtttcctcccaatctattttttcaagttcttctgaaaacataattgttatttttgttatagttctataagatgatttcgcttctataagagcctatttaaactttttcggcatttaaacaggtttcaagctataagtttcttattatttttctacatttctttttgtcgctttccgtcagctcgggatgttgcttcgttcctcccttctggataacgcctttgatagagaatccgctccacttcagaatttcgcgcaacgcttttactacaccgcgtgtctggttaaaccagatattgaacggccatggggtggagcaggtgcttacgatgactgctttcttgcctttatgcaacgcttgggggagtcctttcggactttctcccatcatgccgtacacgatgcggtcgaacactactttcagatgtccgttcatatttccccaataacagggtgaaccgacaatcagcacgtctgcccattgtatcttttgaagcgtgcgctgcgcatcgtcttcgggtaggacacaggcctgccggctgcggcaagccatgcatcctgtacaggggcgtacctgcaatttatggatggatattgcttccacttcggcgccacgtatgcgagcttcttcggccatgatgtccagcattcggctgataagtccttggcaacgaggacttccgttgagtatcaatatcttcattaccttattttttttaggatgttgttgcggacacattgcactgcaaccgtatagtattccggttccatattttccagatatgctttcagctctcctgtcagttccggttcttccaggcagatgtcgtaggcaagtttcatgcagacggcttgtccggatgcgctttcggcagaagatagcataccttgaaggcagaaatcgaagaaagctgcgttgacaggcttcgggacaggaagatgatgaaggatattcagtagcaggcgtcttgttccatcgtgggggcattgcatggcccgtaatcagttcctcccttttatccatcaatagggaaggaaggaggaaactcagtttttcacaagcccaagtggcacgccaggctatccttgtttcttcatgctgcgttagagtataaagagcatcaaagcggtcggggaagctggccacttgatctactatgttgtctatgtgttttcttcctaaagttccttcaagtgctttcttgaaatcttccatagtttttacaaagtcggttgtttaattacccacgttcttcaagtcgcggctcagtttcatagcgcagaagttgggtccgcacatggtacagtactcaccgtccgtatggcggccttcattgaagtattccaaagcgcggtcgggatccagactcagatggaactggtcgcgccaacggaattcataacgtgccttgcttaaagcattgtcgcggatctgtgcgcccggatgccctttcgctagatcggccgcatgggcagcaatcttgtaagtgatgacacctatgcgtacatcttctttgttgggcaatcccagatgttctttcggggtgacataacatagcatggcagtgcctaaccagccgatttgtgcggcaccgatggccgaagtgatatggtcatatcccggagcgatgtccgttaccagcggaccgagagtgtagaacggtgcgttgtgacagtgagagatttggcgttccatgttttctttgattttatgcaaaggtacatgccccggtccttcaatgaatgcctgtacgtttttgttccatgctcggagtacaagttcacccatggtatccagttcggcaaactgtgcctcgtcattagcgtcagcgatacagcccggacgaagtccgtcacccaaggatacggctacatcgtattgtgccagaatatcacagatgtcatcaaaatgctcatataagaaactttccttgtcatgtaccagacaccatttgctcatgatgctgcctccgcggcttacgatgccacacagacgtttgtcggccaaatgtacattctggcggcgtattccggcatggatggtaaagtagtccactccttgttcgcattgttcgattaatgtatctttataaatctcccaattcagatcctctactttaccgtttactttctctaatgcctgataaataggtacggtacctacggggacaggacagttgcggacaatccattcgcgtgtttcgtgaatgttatcgccggtcgagagatccatcagggtatcacctccccatttgcagctccacacggctttttccacctcttcgtcaatggaggaagtggtggcggagtttcctatgttcgtgttgatcttcactaaaaagttcctgccgataatcataggctcgctttcggggtggttgatattggcgggaagtacggcacgccctgcggctatttcatcacgcacgaattcaggggtgataaaggtgtcgatgcccagttcccggcaattcatgttttcacggatggctacatattccatttccggtgtaactatgccggctttggcgtatgccatttgtgtgatggcctttccggctttggcacgatagggcagggcgatgtgttcaaagcgcaggtggtccagacttttatcgtcacggcgcatctttccgtattctgaggtaatggagggcagtttttccacgtctccccgtccaataatccagctttcgcgcatacggggaagtccttttttcagatcgatttccatattgggatcactgaacggaccactggtgtcataaatataaacaggagcattgggcgttgttaccttttcaccgttcactatgttcacagtaggagtcaggtttactttctgcattcctactttgatgtatgggaacagggttccttgcatatatgccttttctgcatgagcgtatgcttttttatcttgctttttgtctatcatatttctgtttaatctaagaatgaagttaaaggggatgaggcggatgcgatcaagttctgtcctaccgctcctaagcctgcttcataagcgcggcgtccggcaatgacagcttccttgaaggccattgccatttctaccggctggccggctactgcgatggctgtattgaccagacaggcgtccgcacccatttccatcgcttcggtggcatggctgggggcacctattccggcgtctactaccacaggaacggaagcttgttcgataatgatgcgcaggaagtcacgtgtctgcaagcctttgtttgtcccgatgggggcggcaagcggcatgacggttgctgctcctgcctcttccagccgtttgcacaatgtaggatctgcctggcaatagggcaatacgacgaaacctagtttgaccagttcctcggttgctttcaatgtttcggtagaatctggcaacaagtagcgcggatcgggatgaatttccagtttcagccagttggtgccaaaggcctcgcgggccatttgtgcagcaaagacggcttcttcggctgtgcgcacaccggaggtattgggcaatagctgtatgtgggggtgaatgatatgtttcagcatatcatcttccttatcgtccagttcaatgcgtttcatggctacggttaccatttcacatcctgatgccagaatggcttcttccattacggtgtttgaattgaatttaccggttcccaggaataaacgggaattaaattcttttccagctataatcagttttttcattgtattttgtgattttattataaattcatgattcgtttagtttccgctaccgggtctttcgcccggagtatggttccgctcaaggcaataccggtgattcccgtttccatgatggaagggatatcttccaaagtaattcccccgatagcaacgatgggcaaatggatatttgcctctttcatttgcagaataatggaacggtaaccttccagtcccagcactggagagagatccttttttgtagtagtaaaacggaacgggccacagccgatatagtcagctccggctttgtaatgcatctttacatcgtcaaatgtattggcggtgcctccgataatgaattcttttcctaatattccccgtgcttcggctacgggcatgtccttttttcctaaatgcactccgtcagcatgaattttcttaactaactccacgtggtcgtctatgataaatgtcgctccatagtctttgcataagccttgcaggcgtatggcttcccgttccacttcgtcaacgggagtgtctttcatgcgtagctggatccagcggcaaccgccttccaaggccatgcgtgcggaatcataataggaatatgtgtcggtgaagtgagtgatgaattgaagttccacggtcttatcctccacatgcagctttaatgactaccagactgtcattggggtgtaacacacatttctcccactctatacggggaaccatccggttgtttaccgctatggcgatacctttctcaggaagtgccagaaaggtggaaagttcggctatggtgcatccgtcctttacttcggtttctttgctgtttactgtcagtttcatactatatcagtttatgaatttacttgtaaatacaaagagttgctttttgaccggatggtatgaggtaagaagtaacaatcccttcggcggtactaaccgcatcaggttcacagggtataatctcagcccgtccgctgtttacgtggggcacccctttgttttacgatggcaaagatatgggaaagaaatgaataatgctacaacagactgctttattttttgtggaagaatgtttttttatgattatcttgcattatgcttgtttattcttgtaaaaggatgaatgcatatctgctgtatctttgcatcttaaagcagattgccccgctccctgaatgaatagggtgcgaggcagctttattatgatgtatagttaagggttcttttatagacgtttttctactacatcccagtcaatgatttcccataacttgttcacatgatctgcacggcggttctggtaatccaaatagtaagcatgttcccatacatcgaaacccagcaatggtttcaggcctgcacgccacgggttgcttccgtttggctctttggtgatatgtagttttccttgcttgtctatagaaagccaagcccagcccgaaccaaacagtcctgtggaagcggcgttgaattctttcttgaagttttcaaagcttccgaagtcccggttgatggcttctgccaatttgccggacggttcatgcttgttgggtttgggggtgaactgaaggaaatataatgtatggttcaatacttgtccggcgttattgaatatcgctccgtcgggagctgatgcaacaatttcctctacggtctttccttcaaattctgtactcggaaccaaagagttcaaattgtttacgtatgtttgtaagtgcttgccataatggtagtctatagtagcctgactgattacaggttcgagtccgttgtttgcatacgggagtttgggcatttcgtaagtcataactaatgaaattaaagtggttaataatatattcatttttagtcgaggttttaattaaacttctatcataataacattattgagcatagaattgttctgataaactcaaactttctctatctttgcgggcgaaaggtgaaatttatgacgaactatttagaagaattgaatgaaagtcagcgcaatgcggtgctttacaacgaaggtccctctttggtgatagccggagcaggttcggggaagacacgcgtactgacttataaaatagcttatttactggagcggggatatactccttggtctattctggcattgacttttaccaataaggctgctcgtgaaatgaaagagcgtatagcccgtcaggtgggcgatcaggcacgctatttatggatgggaacgttccattccattttttcgcgtatcctgcggtgtgaggcacaggctgtcggctttacctccaattttaccatctatgattcttcagattcgaagagtttgatcaagtctattgtaaaagaaatgcaattggatgataaaacctataaaccgggggtgatacaggcgcgtatcagcaatgcgaaaaaccatttggtttttcccgatgcatatgtttcgaacgcagagctttatcagtatgatctgaatgccaaagtacccgctacccgtgatatttaccgacgatattgggaacgttgtcgccaaagcgatgcgatggattttgatgatttgttggtttatacttatatgttattccgcgatcatcccgaaatctgccgtaagtatgcggagcagttccgttatgtgctggtggatgagtatcaggatactaattttgcgcaacacagcattgtgcttcagcttacccaagaacatcagcgtgtatgcgtagtgggggatgatgcacaaagtatttattccttccgaggggctaatattgacaatatattgaaatttactcagctgtataagggagccaagctttttaaattggagcagaactatcgttctacccagaccattgtatgcgcggcaaacagtttgatagagaaaaatagcgagcagataaggaaggaggtattttcggaaaaagcgaaaggggagcctatcggagttttcaatgcctacagtgatgtggaggaaggggagattgttgccaaccagattgtgaaactgcgttcgcgggaacattattcttataatgattttgctattttataccgtacaaatgctcagagccgtatttttgaggaggctttgcggaagcgtgctttaccttataagatttacggagggctttctttttatcaacgcaaggagattaaagatgttatatcttacttccgtctggcggtaaatccgaatgatgaggaggcttttaagcgggtgttgaattatccggcgcgaggaatcggggatactacgttgaacaaggtcattgatgcggctgcacagcatcatgtcagtctttggatggttttggaagagccgttggcatacggcttgaatattaacaagggtatgcatactaaattacaggggtttcgtgaactggtagaaagttttatagtggaggtcccgaagaagaatgcatacgaattgggagcaatgattgttcgtcagtccggcattatgaatgagatttatcagagcaatgatcctgaaaatctgagccgtcaggagaatattgaagaactgataaacggtatgcacgatttttgtgcaacccgtgaagaagaagggaatgaaaacatcctgttgacggattttctgtcggaggtttctctgttgacagaccaggataacgagaaagagggggatgccgagaagattaccttgatgaccattcactctgctaaaggcttggagtttaaaaacgtctttgtagttgggatggaagagaacttgtttcccagtgctttgtcactcaattcgtataaggagctggaagaggagcgccgcttgttttatgtggcgattacacgtgccgaagagcattgctatttgtcttttgccaagagtcggtttaaatatggaaagatggagttcagtagccctagccgtttcttgaaagatattgatgtacatttcctgaagttacctcaggaggaacagatggcccggagaatagacgagagagccagccgtttctgtcgtgagcaaaatgaacgtgcggctcgttccttgtttgacgaacctgcttctcagtcttcttacgggcgttcttcatcgaacatctctggtggtcagaaaacatttttagttggagaaagaccgaaagttgagattattcgtcccagtataccacgtaatttgaccaaggttggtccggaaacggtctcaaagccgtccgcagcgagaaacttgtcggtgaatgtacaggcagggcaggtgatagagcatgagcgttttggaataggcgatgtgataaaggtggaaggaattggtgagaacagcaaagcgactgtccgtttccggaatgccggagaaaaacaattattactgaaatttgcccgattcaaagttgtggaatagaataaatattttaatagaattctgatacaaaaatgatagatatccataaagtaccttctccatgctatgtaatggatgaagcattgctcagaaagaatctgagtttgataaagagtgtggcagaccgagccggagttgagatcatcttggctttcaagtcttttgccatgtggaaatcattccccattttcagggaatacattcgttatactacagccagttccgtatatgaagcccgtttggcgtatgaagaatttggcagtaaggcccatacttattctccggcgtatacggatactgattttccggttatcatgcgatgcagcagtcatataacctttaattctttcagtcagttccggcgtttttatcctatggttgaggcctttggagaaaagataacctgtggtatccgcatcaatcctgaatattcggaagtagaggtggaactttataatccttgtgctcccggtacgcgttttggggtgacggccgatttgcttcctgaaactttaccggagggcatcgagggcttccattgtcattgtcattgtgaatccagttcttatgaattagagcatactttgcagcacatagaagagaagtttgcttcttggttcccacaaataaaatggttgaatttgggagggggacacttgatgacacgtaaagattatgatacggagcatcttatttctttattaaaaaacttgaaagcccgttatcctcatttggagattattttagaaccgggttcggcttttacttggcagaccggacctttggtagcttctgttgtcgatatagtggaaaaccgggggataaaaaccgcgattttggacgttagctttacttgtcacatgcccgattgtcttgaaatgccttatcagccggcagtgcgtggtgccaaaactttaccagtcgatgcgataaaaacagctttaacggaagagaatgtttaccgtttgggtggaaacagttgcttaagtggcgactatatgggtagctggtgttttgaccatccgttacagataggagaacgcattgttttggaagatatgattcattacactatggtaaaaacaaacatgtttaatggaatccatcacccttctattgctatttggcatacagataatacattggaagtatataaagacttccgatatgaggattatcgtgaccgtatgtcttgatagtaagtaaaaaaaacttttggtttatattgactatgaggagtttgatgaaataatgtaataaaagtactataaaaagtatagaaaatttttggaagtttagaaaaaagcactacctttgcatccgcaatcgggaaacagctgggaaatagttaaaaccgaaagcggaaattgcggaaatagctcagttggtagagcataaccttgccaaggttagggtcgcgagttcgagtctcgttttccgctcacataaataaaatcttgtgcgttgtgacaagagtgttacacagaatgcccaggtggcggaatggtagacgcgcacgtttcaggtgcgtgtgtcgagaggcatgcaggttcgagtcctgttctgggcaccatgttagaggtttgcggaaatagctcagttggtagagcataaccttgccaaggttagggtcgcgagttcgagtctcgttttccgctcaagagaaaagatcagtgtagaagtacattgatcttttttatttatcatggtgtaaatgttagaaaacggaagaaggtcaaatcaaaatattgatataccctcctcccgctgttttagtcaaattatccgcaatggaaatatttattgaccaatgccaacatcccttccggattatcttttaagtcgttacgtaaggtcagatcgttataactggttaatttgctgatgattccatcaatcatagtggggctgaacacattatgtttttggaatatttcgcgctgttgttgcaaacaggttgcggaagctgcacagctatcgggaagctgggctaatgccttcagtttgtctgcattttctttctgatggatattgacgtttacgtaagttttttctgcaatgtccagtgcattttctatttcaaatccatggcgacaggctacagctaatcctgctatcagttggtagagatcggccgaaccgtccggtgaccgcatttccactgtctgtttttgtgtggtatcataatggctttctgtttccagtggattggcagtcatgcacatgtctgttttagctgcccatcctagaggtacgcgtaccaatactgaacggttgcggtcaccccagcaaatattagttggcgcttcctgatggggaaccaggcggaaataagaagtaggattggtattaccgaatgcggtgatggatggagcaagttccatcatgccagcaatagctttgcgtgctgtttctgataaaacaccttctttcaacatctggttttgtccatctttcatgatacgcatgtggatgtgcaatccggaaccagcttttcctgtagttattttaggcgcgaaagtaatgttataaccatgtttataggccagattacgtataatccatttggcgatcatcaattggtctgccgcatcttcggcattgacaggcaggaattctatttcattctgttcatatatcatgccattcaaggtaaaattacctacttcggaatgtccatattttatttgtccgcctgcttgtgcaatgtaggccatgcactgggtacggaaatcattgaacttggcatatggtgctgattcatgatagcctttctgatctgtagcctcgaacatatttgtatccggagcaattacatagtactctaattcccccatagcctgaaattccatgccggttacttcattgaatgccttgcatgctttgtgtaaggtatgttcgggggaactttccaatggctctccatccttgttaaagaaagagcaaagcatggaaagtgtaggtatctcggcaaacgggtccaaaaaagccgtccggaatcggggaattacatacagatcactgctgcccgcctcaatgaatggaaacaggctggaaccgtccacacgttctccacaagtcaagatagcatctagatatgcttggttgttgataacgaaattcaatgtcttcagtcgtccgtctccggcgggatacataaagttgaccatacggatgccattctgttgaatgtatcgttttatgtcttctttggtaaactctgcacaaggtttttctagaaatgccaccaattggttggggttcattattaattctttattcatagcaaaattggttgttttttgtttgttatttggttaactttccaaagataacaaaaagttttctgaaaatcctatgaaaagttcatagatattttctttcatactgagtgatattctctttatctttttctgtttgggagaacatcgttttataatttgtcctacctttgcaccgctgttttaaaatataaataagagaatcattatggaaccgatgcataaaattaataaagtagaggtccggaatttacagatcgaagattacatccaattatcacaatcattcaagcgggtgtatgcggataaggatgtgttttggacacacgagcaaatagaaacgcttatccggatttttccggaagggcaagtagtaacggtggtagacgataagatagtgggatgtgctctttctattattgtagactatgatatggtaaagggagatcatacctatgccaaagtaactggtaatgaaactttctgtacgcataatccggaagggaatattttgtatggtatcgaggtgtttatccatccggattatcgcggtttgcgtttggcacgccgtatgtatgagtaccggaaagaattatgcgagaaactgaatctgaaagcgatcatgttcggtggtcgtattcctaattattataagtatgcggatacgatgcgtcctaaggaatatttggataaggtgcgttcccgtgagatttatgatccggtattgacatttcagctttccaatgattttcatgtgcgtcgtgtcatgaagaattatcttcccaatgacgaagaatccaagcattgtgccactttgttgcaatgggataatatttattatcaggagcctacgcaggattatgtggataagaaaaccactgtacgtgtagggttagtgcaatggcagatgcgcccttataaaacattggatgatgtatttgagcaggttgagtttttcgtagatgccgtttccgattataagagtgattttgttctttttccggaatatttcaatgcgccgttgatggccaagttcaatcatttgggagaagcccagagcattcgtggtttggcacaatataccgaagaggttcgcgaccgttttatcaatttggctatcagttataatattaatatcattacgggtagtatgccatacgtaaaagaggacggagggctttataatgttggttttttagtacggcgtgacggttcatacgaaatgtatgaaaaggtacatgtcactcccgatgagataaagagttggggcctctcgggcggtaagatggtgcagacttttgatacggattgtgctaaaattggtatcttgatttgttatgatgtggaatttcccgagctctctcgtatcatggccgatcagggaatgcagattctgtttgttccattcctcaccgatactcagaacggctattcccgtgtacgtgtttgtgctcaggcacgggcaatcgagaatgaatgttttgtcgttatagccggtagtgtgggaaatttgccgcgtgtgcacaatatggatattcagtatgcacagtctggagtgtttactccgtgtgatttcgctttcccaactgatggcaaacgggccgaggcgactccgaataccgaaatgattttagtttcggatgttgatctgaatctgttgaatgaattgcatacgtatggcagtgtgcgcaatttgcgtgaccgcaggaatgacctttatgaactgaggataaagaaataaaaaaatgtttcattacggattactcaggttaacgctggtttatagataagtggttattattttatatttccgccttacttttaagaataacctgtgttaatcagagtgatcctgtaatgaactttgttatttcaaaataaaagaagctacgggccattctataacaaatatagtttttccttgtctgctttcctgtaaatagaaattgcccccatgtctttttataatctgccggcacagactaagcccgataccagttccttctgtttttgtggtaaagaaaggaacgaatattttttcttgcaattccatagggattccccgtccattgtcaagtagtcttatataaagtttgtttgttacttccagtgttacttctatttgtccgtctgtttttccttccaatgattgcatactgtttttcagcagatttaaaaaaacttgagagagttgcttctcatcgccctcaatatatatatcagagggggtgctacgcagaatgaaatggatatgagcattttcaaaatcagattgtagtaacagacctagattgtgcaatgaattggtcagtgagaatcgcttctttttcggttccggcatatacgataagcgtcgatatgattctgtgaattccatcagtctttcgctttgttcacgaatcactccaagtcctcgtattactttctcgtccgtaccggggcgcaatgaaagtgtttgagacagagaaacaataggagcaatggtattcataatttcatgagtaagcacccgggtaagtttgttccatgactcactttctttctcgttcagttcattactgatatctttgatagccaacagggtaatcgtttctgaatttagtttcatccggttcatggatagtgacagttgtttttttgagttagattgtaaaagaaaggaattttccacatttccatgggttatgaaatctttcaagatcggatattgctcttccaattggcggaggaatatgattgactcaactcccagcaaacgtaaggctgcaccatttacaaacagaactcttttttcggagttccacgctagcactccatttggtacttcttccagtaaagagtgataaaagttctcttgtacccggctttgcgatttcgttgtggcaagcaattcattgattcggtttagtgaatggctaagtgcattcatttctttatctgccgattgctcgttgaacagtatcatgctctctttatcttccatcgcatccaagaatattcttattttggcattgaatttattcaattgttttaccaaagctctgataaaaaaaagtgaaataatcaagaaaagacagcctagaataagggcggtatgtgtaataataagtgcgataccagctccggctacagcaattattaataagatgtagcttaggataaccatatatagatgtttgctgaataccatgatcatcagagcttaaagcgttttattttattgtaaagtgtctggcggctgatgcctaactgttcggctgttgctgtcagatttccatcgttttgacggatggctgtttctatggcctggcgttctacttcttccagattaggaacggtagtggagaattgtggactccaggtttgttttacgaaaatgtctttggaacggattacatctccttcacataaaataactgctttctcgatggtatgttgcaattcccggatatttcccggccaatgataagaacataatttctctaaagcatgttcatgcaggaagatttcttttttttcgtatttagcagcatagcgctgcataaaataattaatgaacaaatgtatatcttccctccgttcgcgtaaaggcgggatttccagatgaatagtattcagtctgtacaataaatcctcacggaaagtcccggaatccaccatatcctgaatattcttgttggtagctgaaagcagccggatatccactgggattactttattactgccgatgcgtgtaatttttcggttttgtaatacggtgagcaactttgcctgcatggctaaagggagatttcctatttcatccataaacagggaactgccggatgccgcttcaaactttcccggccggctctcgtaggcatcggtaaaagaaccgcgctcatgcccgaacagttcactttcgaataaagattcactgattgctcccatatctaccgttaccatagaatgttcctttcgtgtggaaagccggtgtatttcctgtgccagcatttcttttcctgttccgttttctccggtaatcaatatattggcatctgtgcgtgccactttcactactatcttcattaactgctgcatggcaggggatgttcccacaatcatcggtgatttgtttctatcggggattctgtttttccttttcttaccgcttccaaaagcatcttttattttgcgcactaaggtccggttatcccaaggtttcaacaaaaaatcagttgcatcattctttaaagcctttactgccagttctacatccccgtatgctgtaagcatgactacgggtagtgcaggagctatctcacggattcgtttcagccaatataacccttcgttgccgttattgattcctgccgagaaattcatatcaagaataatcacatctatcggagaggtatttatgatagatatgatttgattcggatgatgggctgtctttatttcgctgaactccgtttccagtaataattccagtgaggccaatactcctttattatcatctactattaaaatcgttcctttttccatctcatttttgctttcagaggctaaaggtatctgcttttgattgtttctgcaaatgaggcgtccaattattggacgttttttattattttctgtaatgcttttatttatcataacggtgacttgacattggaatgtgtcttcagtccgtgttgtcagcgttccaatatcttccttggttcgttctggttttatagtgtttataatttggacgttataccgtctaaaatttggacagctaatttatattttattttgtaactggttgattattaatgttctgatcttcttggcatatcgtttgcttcctattctgtgtttaaattaaaatgcaatgagaaataacttgataattgtgtgtttgttgtccggtctgtctttgcctgtatgtgggcaaagtacactggacgattgcatacgttatgcttggaaacataatcctggtttcaagaatgtccaaatagacgtaaaggaagcacgaacagactatgtggctgctatgggtaaatttcttccttatgtttcagtacaggcggaagtgggcaggcatatcggacgttctgtcgatccggatactaatggatatacagccgattcatataatcaaggaactataggaatggatataactctttctttattcgaaggatttgcccggatcaatcgtttgcgatatacgcattggactaaaaaagagaaggagtgggatcatctggcaaagaaaaatgatttggcttatcgggtagctgaggcttattataaagcggtattggataaaaagctttcagaactggcagctgaacagcttcgtttgggagaacgttatctgaaacagacggaagcttttgtagaactggggttgaaatcgctttcggacttgcaggaagtaaaagcgcgtcatcaaggagatgtgttcagagagcgtatgtatgaaaaaaatcgtcagatgtcctttctttatttaaaggaaatactgggtatgaaagagggcgatgttttgtctgtttctttatcagtcagtgaggatacgctcttgttaatgcctcaagtagaggtagaagaagtctatttacggtccgtacacgtactgccggattataaacggatggaaatgtgggaacgcgctgcccgtaaggagtatgctgtgacccttggacagttcagcccgactatcttcgcccgtttctcatggggatctgatttttataattccttgttctcgttacatcaattgcgtgaccattggaataaatatataggagtaggtatttcattccctattcttagcggattagatcggaatgccggaataaggaagaagaaattaaacttgcaacgggtgcggaacagcatagaggaagagaagttacatttacgtaatgaaacggaacgaattgtactttcattacattcgggatgggaagagcatcgacaggcttccctgcaggtaaaagcagaaacgcaagtgctgaaagaaacggaacggaagtgggaggaagggcttgtttccgtgtttcagttgatggaagcacgaaatcgcctgcttgtcgctaaagcggaaaaaataagagtgcgtttgcagtacgaactgacatcgcgactaactatgtattatcggacaggaagttttattaaccattaaaaaatatggacacactaattgaacgtaaaaagcgtttcactcccaggcggatttatggaggtgcgggagtattattcatattggtattcgttttttattttatttttcgtgataccggttcttccatgaccattgacaagagccgtatcactatcgctacagttacagaaaatgagtttaatgattatgtccgtgtgattggacaagtacttcccagccgcatgatttacctcgatgctatagaaggcggaagagtggaggaacgccttcatgaagaaggagcgatggtaaagaaaggggatgtgattctgcgcctgagtaatcctctgctgaatatcggtatcatgcaaagtgaagcagatctggcctatcaggaaaatgagttgcgtaatactcgtataagtatggagcaggaacggttgagtctgaagcaggatcgtatcggtattcagaaagaattcattataaagaaacgtcgttacggacaatacaagcggctgatggaggggcaattgatagcgagggaggactatctccaagctacggaggaatatgaagcggtaaaagaacaattgtcggtattggatgagcggatccgtcaagatagtttgtttcgtttgactcagataagcagtttggacgagaatataatgaatatgaaacgaagtttggcattggtacgagaacgtcttgaaaacctgaaagtgaaagctcctatagacgggcaagtgggtaatcttgaagcacaaatcgggcaatccatttctgccggggaacatatcggtcagattattactgctgatctgaaggtacaggcattaattgacgagcattatgtggagcgtgtcgtccaagagcttcccgctgactttacccgtgatggagaaaattataagttggaagtaaccaaagtgtatcctgaagtgaaagacgggcagtttcgtacagatttccgtttcacgacagggcgtcccgaaaacattcgggcgggacaaacttatcatatcaatcttcagttgggggatcctgtcaaagctgttctgattcctcggggaggtttttttcaaattaccggaggacgatggatatatgttgtggatgaaagtggtaaatttgccgtcagacgtcctatcaagattggcaggcagaatcctcagttttatgaagtgactgacgggctggcttccggtgagaaagttattatttccggttacgagctgtttggagataatgagaaactgattttaaacgaataaaaaacacacgtaagaatgattaaagtagaaaacctctctatgttgttcagcaccgaggaagtgcagaccaaagcattgaatgaagtaactttcgaaattgaaaagggagaatttgtcgctatcatgggaccgtccggttgtggaaaatctaccttgttgaatatacttggaacattagatacccctacttcgggctcctatctctttgaaggaaagcgagtggataaaatgaatgaaaaccaactgaccgctctccgaaaaggaaatatcggtttcatcttccaaagctttaatttgattgatgaactgactgtatatgagaatgttgaactcccattggtgtatcttaatataaagccgacagaacgtaacaggcaggtaaaagaagtgcttgaaaaagtgaatatgctgcatcgcgccaatcatctgccacaacagttatcaggtggacagcagcaacgtgtggccatagcccgtgccgtagttaccaatgccaggcttttgctggcggatgagccgacaggtaatttggactctaccaatggggtggaggttatggaactgcttagtacactgaacaaacaggggaccaccatcatcattgttacccattcacagcgtgatgctgcttatgcacatcgtataatccgtttgctggatggtaaaattattgccgagaatcgtaaccgccctatggaatctgacagcaaaattgaaattttatgattatacaaaattattggaatagcgtttggcgtaatctgatgaagaggaaaggtttcagcttcatcaatatctttggcttggctgtaggcatggcatcagctttattgatatttacttacgttgcttttgaatttagttttgacaaaatgcatagtaagagtgaacggatttatcgtgtgcaaagtacttttcatgagggggaagttctgacggatgattgggcgaccagttcattcggatatggttcggccatgcaggaaaatctggcgggaattgaggattatactcgtgtaggatgtattatccaaccggagcaattggtaaaatatggcgaattatgtctgcgcgagaatgggatagcatacgctgatcctggctttttccgtttgtttgattttgaattgttgaaaggtgaccgcgcttcttgtctttccatgccatgtcaggtagtgattacggaacggattgcccgcaaatatttcagagatgaagaccctgtcgggaagatacttatttttaacagcaatatggggaaggtgtcttgtgaggtaactggaatcatgaaagaaatgccttctaattcgcatatacattataattttcttttatcatatgccaccttacctaaatgggtacaggagtattggtacaaacatgaagcctatacatatgtattgctggattcgcccgagcgcaaagaagagatagaacgtgcttttcctcaattggccgagaagtataaaactgaagaggcattgaaaaacaagacttggggggtgcggttggagccattggagaagattcatctcaatcctcaattaggttatgaggccgagttgaaagggaaccattcggccatcatcgcattgattttcggagctattgctattttgattatcgcttggatcaattatataaatctgacagttgcccgttctatggagcgtgccaaagaggtaggagtgcgcagggtagtgggagctttcccgaaacagcttgttggtcagtttctatttgaagcatttgtaatgaatttgatcgcttttatcattgcgttaggattgatcgaactattacttccttccttcaatcagttggtaggacgtactattactttctctgtatggtttacggaatattgggggggcggggttctattgctttttatagtcggtatttatatttccggttactatcctgcccgcgcattgttgcgtaagaagccgattgttttactgaaaggtaaattccaaaatagccgttccggagaaaatacacgtaaaatattggtcatagtgcaatatacggcatccatgatattgctttgtagtacattaattgtgtttgcacaactcagctatatgcgtcggcagtctttgggagtaaagaccgaccagattctggtaatcaagtttcccggacctactgagggtatgaaaacaaagatggagtctatgcggagagctatcaagaaattgccattggcgtcgaaagtaacttgttccggggcggtaccgggtgaagaggtggccatgttcctgtccaatcatcgggcacatgatgcgttgaagcaaaaccggttgtacgagatgctgagttgtgaccctgattatatagatgcatacggactggaggtggtagccggacggggtttttccgaggaatatggggacgatgtgaataaattggttatcaacgaaacggctgcccgtatgttaggatatgtggataatgatgatgccattggtgaggaaatagctgttgaaacgctaggagagcccatgcaggtaatcggggtagtgaaggattatcatcagcaagcgttgaataaaggttatacaggggtaatgcttttccataaagataagattgactggattcctcagcgttatatttcggttgtgatgaaaccgggtgatccttcggaattagtatcacagataggagaaatatggaataattactttgcggattctagttttgattatttcttcctcgaccagttctatgaccggcagtaccgtcaggatgaggctttcggcgtattgatgggaggttttaccggattggctatttttatctcctgcttaggtttatgggtgttggttatgttctcttgtgccgtccgtaccaaggagatgggtatccggaaagtattgggggcatctcgttggaatctgttttatcagttgggtaaaggtttctttattcctattattatcgctattctgattgcgttgcctgtggcatggggcagcatgaatgcatggttggctcattatccgttccgaacagaattgaaagtgtggttctttctgcttcctgtggtcttgatgttgttgatttcttttctgactgtagcaggacaaaccataaaggttgtttatagtaaacccgctcggtcattgaaatatgaataatggaatataagatatccgtggttagtaattcatttacaaggaatatcatttaaaaccaatataaattatcgtaccagttcattatggcagatcaatactgataaactttgaaaaccttttgaatttttctacaaaactaattttgcgtctaaaattattttattaattttacagcgtttttaaggagagtctaactctctatagttacaaatgagcgatgagaaagggtgccttggtggcatcctttctcttttgtagtgtgtttttgtataatttatattgtattttacttatgtcacgattatgtgaaatcacgatacatcttttgtatttccgtttcttttacttttatcagacttaatcgtttttcttgcattaaaaaacaattggacctccctttgctatatatttaacactcttttaatctcattttgttgaacaatctacgcgattcaaatgttaatataatgtgtttttcatagtaatagatttaagattaatagttagtatttgcttgtgaaagtcagtacacttacggataaaagcgtttatccgaaaagaaaagagaggcgaccggaaacggaagcctctttctttttgagcatttttagttcaccataattattgtgagaggaaaattgattctgattgtataaataatataatgtgttgaaaataagatttttccctttttaagcctttaataaaaaatggagttctcttagtaagagaaccccattttgctgcaaagatagctataattccttaatacagaaaattccgcattaaaaaagtattccaaagtatgcttataaatgacaattgtttgcaaaaataatatgaaaggttataactataggacactctatcaggcatttaagtaaacttggggttctcttactaagagaaccccaacaaaaaaacgaaaattgatggcttatggaaaagccactcaactttgccccttttggccacgcagaattatcccttttggctaaaatatgattgacccctttggctaaaatagtgttgcccacttgcttcacctataattatagtttttttgtgtagatttgagtacccttgtcctggtgtaacgggggagaaaataaaatctatacaaatgaataaacgaatcaaaaacattttaagatgttatgcggctggcataggaatcaaggaaacggcatctacgtttcatatttcccgtaatacagtccgcaaatatgtccgcttattcctttcaagcggcaagagtattgaacagcttctttccctgcccaatggacagttggatgaactgttcggctgcacggatacccggcatcgggagccttcatccaaaaggattgaattggaggccttgcttcccggatatgtatctcgtctgtcacgcaaaggtatgagtgtccgaaaactgttcaaggagtaccataccgaatatccggacggctatcagttgtcttccttcaaacggattgtcagcgaatacaggtttcacattaaggttgtcggtcatgtagagcactatgccgcagagcagatgtatattgactttgccggtgacagacttgaagttgttgatgaaatgacgggcgagacgaagaaagccgaggtatttgttgccatccttccgttcagccattatacctactgcgaagccgtatggtcgcaacgcaaggaagacctgataaaggcatgcgagaatgccattcaatattttgaaggtgttcctgcggctatcgtccccgacaatctgaaggctgccgtcacacgaagcgaccgcaacgaacctgtcatcaatgatgatttcgccgcttttgccgaatattacggctgtgtggtctatcctgctcgtgtgcgtcaccccaaggacaaggctttggtagaaaatgccgtaaagctcctctaccgttccatttaccttgatatagagggaatgacattttccagtttggaggaactcaataccgccatccatatttccttgcttgatttcaatgaaaaggtgatggccggacgggagatgtcacgcaaggaaatattccttcatggagagaaggattatcttcgtccgcttcccgtgaaacgctacgtaatgaaagaaaggaaactgatgaccgtgggaaagaactcttacgtttccttgttcaagcaccattacagtgttccgaaagagtatgtaggcaggcgcatgacgattctctatgatgccgacacggtggaaatctattgtggaatgaaccttgtcgccacccatgaccgctgtgacattccttacacttattcttggaaaaaggagcacaacctgcctggtcattatggtccctatgacaaggacttggaggaactctttcaacgtgcctcggaaatagacaacatcgtattgaactatcttcaggaagtggagcgtgtcatgcaatatccacccaaagcgttcaggtcatgccgtggcatcatgacactggagaagaaatacggccgtgaccgtctagttgcggcttgcgcatgtgcggatcagaaattgcaatacggataccaagccttgcgcgaggtgcttgaactgggagaagatgtggatttccttcctgatgaggacggaaaagtacagtccaacgtgacttcccagattccattgacccacaaaaatatacgtggacgtgaatattacaaaaaagacaaacaataaaactattatttatggaagtaaacaataaaacagctcccgttacgggacaacaagaccagaataccatatcactggatttaatgaaccgtatgaaattgcatggtatggcagaggctttcagggaaagtcttgccggcaccactccgcaatccatgactgcggacacgttcctttccatgctccttgcacgcgaatgggactatcgctcccaggctgccattgcacggctcaccaaaaatgcggcattccgctacaaggcttatattgagcagattgactatgccacgaaccggggactggaccgcaatcagatggaacgtctcgccacccttgattttgtgcataaggcacagaaccttttcattactggttcttccggaacgggaaaaagctatttggcctgtgcccttggacacgaagcatgcaaaaggggattccgtaccttctatgccaatgctccgaaactgctcggtgcgctgaaagtcgccaaagtaaaaggtacacttgaagcggaactcaagaagattgagcgttgccagctactcattcttgacgacttgtttattgtaccacttgacgccaaagagcgtcccatactgcttgaaattattgaggataggcatgaacggaaatctgtcatcatcacatcgcagtatccatcttccaactggtatgacatggtaggtgatccaacaatagccgatgcaatccttgaccgcatcatacatacggcccatactatagaattatatggtgaaagtatgcgaaaattaaaatctaagaaaaacgagaatttttaaaagggtaaaataatattgccccccaacaccaggactttaaagggtcaatcatatagtacaaaaaggtgggcaaatcttgcgtggccaaaagggtcaaagttgagtggcttttccaacctttggtgggcagtaattctaagactttaaataaagaaaaattaagctaccccttaaaaaaaagagatatttcctttcaaagaattcatttcttttattacatttgtattagtcttttgaaaatagaagatttatagtaaagcgttaaggcattatccaagttcaggaaatccccaatttcgaaacaacaattggataatacattggacgctccacgttctatctatatagatttttgttatatataggcgtggggctttgtgtattatatgttgttgagtatggggatacttctgaacggtaataccaaagttcccacgcttaactttatataaacacaactccagggaacagggttggcttataataaacattatgaaagcaacttgttttaaaagcgagacaactgtctccaacgactttccccctttgtttgttactatcttttgtggaatattctatcctttcatttccattcctgtctctttcggaacataccgttcattatcatacaaattacatgccaaagcacttttctgccttctcctgctatggtactagataatagtaactccccctatcacatagaggaagaactttggttacagatactttctctgtcaagagagttgcaggagtgtaaagctagtctgcaccataatactttggactgtatttccgataagattgaaggaatagaaagagaactggatgtcttattggatattctgcaagggaggcaagacaaaaagacatcatagtgctattttttatgacaatttgtctacgccgataagttatcctattatttaagcctcgtttaagaattccgttttatgggttacccacaatcgaatggaatttttatatactgagaataacacatgatattagtaatggattttcaatattcagagtgataatggataaacgaatagaaaacgccatgaatgagttgatcaatacagaaatatggtcaaccggtttatacctgtcattgcaggtttattttgaagatgaacggcttccaatacttagctcctggctgaactcccaagcacaggacaatatgaacaaggtttatcagatgatgaatcggatatgccatgatggaggatgtgttgtaatcaatgaaatgaaacgggatacacattaatggacaacgccattgaatgccttgaatgaattgcttgaacatgagcagtacatatcacgtcaggtaaacacatttctcatattatgctggaatgtaagcatgtccttccattctttcatcagcgggctgtatgcagaccgtatatatgtaagtatggcatttatggaattgttacgtatcctcgccaaggaaaacgaacggaaactaccttatttttgacggtatggatttaagattgatgttatgcaaaatttaatattgcagaatgctatctggtatgttttttgcgatataataatcgataataaactatatgtcatcatggatatatttgtatatttaacattgtgtttcacttcgctattcaccttgatggaccctcttggagtgatgccggtattcctgcaaatgactgatggaatggatacgaaagaacgcagatatatcgccttgaaagcatgtaccattgcatttatcatattagtcctttttacattatcgggcaggtttctgtttcattttttcggtatctcaacaaacggattccggattgtgggaggtatcatcatctttaaaatcggatatgatatgttgcaggcacattttacccatgtgaaactgaatgaaactgaacgaaaagaatattccaaagatataaccatcacacctcttgccattccgatgttatgcggtccgggagcgatttccagtggaataacattgatggaagatgcttcggaatatactttcaaaatagtattgcttggcgtaatcgctttggtctgcattctttccttctttattctgtacgcgtccacccagcttttaaaaatcttgggagagacgggaaacaatgtgatgatgagactgatgggacttattctaatggtgatcgccgtggaatgttttatcagcgggatacgtccggtattaattgaaatcttgaaacaagcccatgcttgttcttaaagaagagagataatttggatttattattaacattaaaagtttgattcatcatgactgaaaaattgcaaaatgccctgaatgagcaaatcacagcagaattatggtctgccaacctgtatttatcaatgtctttttatctggaaagagagggcttttccggaatggctcgctggatgcagaaacagtctgcagaagagaccgggcatgcatatgccattgccgggtacatgattaagcgtgaggcaaccccgaaagtagacaaggtcgatgtggttccacaaggttggggtaaccctgttgaagtattcgagcatgctttggagcatgaaaaacatgtttccagactgattgatgagttggtacaggtagcatccgaagagaaagacaatgccactcaggacttcttgtggcaatttgttcgtgagcaagtagaagatgaagcgaatgtactcaatattgttagtcatctgaggaaagccggagactgtgctatcctttttatggatgcaaaactgggtgaacgggagtcataaaccagaataatcaataaaaataaataaaatgaaaatagtagatttattgggaggagaggctgagtactacctgaaccatacatgtaagacgatagacaaacaacttatccatattccgggaccggatatgatagataaggtatggatgaattccgacaggaatatccgtacattggaaagtttgcaggctttatacggacatggacgtctggccaatacgggctatgtatccattctgcctgtagaccagggcatagaacattctgcaggagcgtctttcgcccccaatccgctttatttcgatcccgaaaacatcataaagctggccattgaaggagggtgtaatgccgtggcatccacattcggtgtgttgggcgccgtggcacgcaaatatgcacacaagataccttttatcgtcaagctgaaccataatgagttgctgacttatccgaacagctacgaccaggtaatgttcggtacggtgaaagaggcatggaacatgggagccgtagctgtcggtgctaccatttatttcggttcggaacaaagccgccgccagatagtggaagtgtcacaggcttttgaatatgcccacgaactgggaatggctactattctgtggtgctatttgagaaacagcagcttcaaaaaggatggtaccgactatcatgccgctgccgacttgacaggacaagccaaccatatcggggttaccattaaagccgatatcgtgaagcagaagctcccatccaataacggcggtttcaaggctatcggattcggaaagacaaacgagtgtatgtattcggaactgaccactgaccatccgatagacctttgccgttatcaggtggcgaatggctatatgggacgtgtcggattgattaactcgggcggtgaatcccatggggaatccgacctgcatgatgctgtcgtaacggcagtagtaaataagcgtgcaggtggtatggggctgatcagcggtcgtaaggctttccagaaaccgatgaaagacggagttcaacttctgaacaccattcaggacgtatatctggattcttcaataaccattgcataaagaagaagtatccatgaaaagaatagtgttattacgtcatggcgaaagcctatggaacaaagaaaaccgttttactggatggacggacgtggatttaagcgagaaaggagttgaagaagcctgcaaggcaggcgatgcattacgggaggctggattttcttttgaggcagcttacacttcttacttgaaacgtgccgtaaaaacgttgaactgtgtcttggaccggctggatgaagactggattccggttgaaaagacctggcggctgaacgagaagcattacggcatgcttcagggactgaataagagtgaaacagcggtccaatatggtgaagaacaagtacacatctggcgaagaagctatgacgtggctcccgctccggtaggcaaagatgatccccgtaatccgggcatggatatccgctatgccggtgtaccagatagggaacttccccgtacggaatccctgaaagatactattgggcgtgtcatgccttactggaaatgcatcatctttcccgcattgatgtataaggacagcctgctggtagtcgcccatggtaacagcctgcgcggaatcatcaagcatctcaaaggaatttccgatacggatatttccaacctgaacctgcctacggcagttccttatgtctttgaatttgacgacaggctggttcttgtcaaggactactaccttggaaacccggaagagatacggaaacgggcagaagctgtggccaaacaagggatggctaaaaaataaaaatctgtctatcaagcagatgcttttttttaagttttaattattaacttttaaagaggaggtaaaaatggtacctgtaaaaacaaaccagaattggttaccgagtatttttaacgattcctttgacaatgaatggatggcaagagcaaacgctacggctccagccatcaatgtgattgagaatgaaaaggactacaaggtagaactggcagctccgggaatgaccaagaatgattttaaggtaagtgtggatgaaagcaacaatctggtaatctgcatggaaaaaaaggacgagaaaaaggaggagaagaaagacggaaaatacttgcgccgtgaattctcctattcccgattccagcagagtatcctgctgccggataatgtggaaaaagataaaatttcggccaaagtggaacacggggtcctgtttatcgatattcccaaagtcgtagataagaaggttcaggaaaccaccaaaactattgatgtcaaataagatatcttgatgagactctacagaaggcatttcttattatcagggaatgccttcacccggatatttgaattccaaaataaatataatgagaggatttgatttcgataaagcgctggtagcccttcagaatgaactgcattgttttgcatataaactgactgctgacaaggatgaagcagaagacttgttgcaggaaacaatgttgaggacgttggataataaggataagtttgattccggtacgaattttaaaggctggatgtataccatcatgcgcaatgcatttatcaataattgccggacaaagaaaatacgagggaatttatatgtattatcagaacctaaatatcatttcctgttaagggacgactctttcattttcgtggataacgggcatgatgcaaaagagataagggaagcccttaaaacattgcctaaagcacattatgtcgtttttatgttgtaccggagtcaaatatcgggaaatagccgcaaagataagagtgtcactgggtacgataaaaagccgtatcttttatagcagaaaaaggctaaaacagttgctttctgattttgcctgattaattaaaatataaaaaacaaattatggataacaagtatattggaattctgacttccggaggggatgcttcaggaatgaacgcggctatccgtgccgtgacccgcgccgccatttttaacggatttaaagtgaaaggaatttatagaggttacgaggggctgattgccggtgaagtgaaagaactcacgacggaagatgtaagtagcattatccagaggggaggcaccatactgaaaacagctcgctccgagactttcaccactcccgaaggacgcaagaaagcttataaggtcatacagaaagagaacatcaatgctttgataattatcggtggagacggttccctgacgggagcccgtatctttgcggaggagtatgatgtgacgtgcataggattgcccggcaccattgacaatgacctatatggtaccgattttaccataggatatgatacggcattgaacaccattgtggaatgcgtggataaaatcagggacacggcaacctcccatgaccgtatcttctttgtcgaagtaatggggcgtgatgcgggcttcctggcacaaaacagcgcaatagcttccggtgctgaagcggccatcatcccggaggacaggacggacgtggaccagttggaaacattcatcgggcgcggattcagaaagacgaaaaacagcagcatcgtaattgtgaccgaaagtcctgaaaacaagaatggaggtgccatatattacgccgaccgggtaaagaaggaatatcccgggtatgatgtcagggtttctatcttgggccatctgcaacggggtggtactccgagtgccaatgaccgtatactggcaagccggctgggtgaagccgcaatccaggccttaatggaagaccagcggaatgttatgataggcatacggaacaacgagattgtttatgttccttttgtccaggcaatcaaaaaggacaagactattgacaaaagcctgatccgggtccttaacgaattatcgatataaaatagccgtcaacatgtcagaagttgctcccttaatatcggatcttgccataattctgattattgccggtattgtaaccgtcattttcaagtggctgaagcaaccggtcatattgggctacattgtagccggtattatggcgggtccttccgtttccctggtcccgactgtttccgatcctgccaatatcaaaatatgggcggacatcggtgtcatttttctgctgttcgcgatgggactggacttttcgttcaagaaattgataaatgtgggcattacggctatcgttgccactgtcactattgtatgtggcatgatgttcataggttatacagcggggaatgcaatggggttctcccacatgagcagtatttttctgggtggaatgttgtccatgtcgtccacggccatcgtattcaaggctttcaatgatatgggacttctccaacagaaattcactggcattgtcttggggattcttgttatcgaagatctggtggctgtagtgatgatggttgttctttccacgttggcggtaggcaaacattttgaagggaaggagatgctggaaagtatattgaagctggccgctttccttattttctggtcgacattgggtatctatctgatacctaccctgctgaagaagatacgccgtttcaccagcaacgagattttattgataacctctctgggactttgcctgggaatggtgatgattgcgacaaaagcgggattttctgccgcattgggagcctttgtcatggggtccctgctggcagagaccgttgaagcggaaaaaatcgtacatatcgtacagccggtaaaagacctgttcgcttccatatttttcgtgtcggtaggaatgatgatcgatcctgccatgatgtgggaatatgccgtccctattctcatcctgacattgctggtactgtccggtcaggtcctgttcgggagctttggtgtcttgctttccggccagccgttgaaaattgccatacagtccggcttttcactgacacaggtcggtgaattcgcattcatcatcgcatctttaggcgtcagtctgaatgttacggacaagtatctctatccggtcatagtggcagtatctgtcataacgacttttcttaccccctatatgatacggctttcggaaccagcataccggtttatagacatccacatgcctgaatccctgaaagattatctcgtacactatacgtccggggcaatgactgtaaaacaccaggggacttggcataaactgatccggtctatgctggtgtctgtcacactctatctggtcgtatgcgtttttttcatcactttatatttttcctatgtgcatcctttgattaggaaaagtctgccgggaatggaagggaacttgttgggcttcatcatcatctttcttgtcatatccccgtttctatgggccatcatcatgaaaaggaacaattcaaccgagttccgtaaactctggacggacaacaagttcaacagagggcctttggtatcaatagtacttgtcaaaatactgatctgcacgattatcatgatgagtatcattacccatcttttcaatgttgccttgggagccgggttggtagtctcttccattatcattgccgtcatttatttttccaagcggatcaagaaacggtcgctgactatagagagacaatttatggcaaactttcaggggacggacgggaatgtactttctacagaaagtgatacaggctccacccttggcagcaatatcccgttcaaggaattacatttggcggatttcacagtatcccctgattccatatatgtgggcagaacattaaaagaaagcagcttgcgcaccttgtttcagataaatgtgatttcaatcacccgtggagaaaaacgcctggatataccacaaggggaagaacatctctatccatatgacaaggttacggtcgtaggtacggaccggcagttggaaagcttccggacatccatggagcaaaagaaggtagaaaggaacgggaacggaacatcctcgcaggatgagatggaaatagggcaatttcctgtcgaaggaggttcaccattgatcggaaagacgatccgggaggcagacatatcggatagcatcattatcggaatagagaggagtaccgtgaatattatgaatccagaccctgatacaattttcaaggagaatgatacggtatggattgtcggtaaacgaaaaataataaaaggactgaataaagattaggacttatttaattaaaatgtcatggaatattcaagttataatgtaaatacccctcagtggagggagattacagtaggttcacatcttcctgcagaactgcggaaacttgcagaaatcgcacataatctctggtggacatggaatgatgacgcaaagaaactgtattgtgatttggattcggaactttggaaagaggtggaacagaatccggtattgtttctggagcggataaattatgagaagcttgtagcgctggcacatgatgagaactttgtctataaaatggatgccgtctattccgccttcaaaaaatacgtcgatgtggaaccggatcaccagcgcccgtcaatagcttatttcagcatggaatacggcttggatgaagtccttaagatatattccggcggtttgggtatgttggcgggggattacctgaaagaggcgtcggacagcaatgtggacctttgtgccataggacttttgtaccgttacggttattttgactagtcgctttccatggacggccagcagacagtcaattataaagcgcagaatttcgggcagctcccgattgaaaaggtaatgcaaccggatgggaaacaactggtaatccacgtcccctatgccgacagttttgtggtacatgccaatgtctggaaagccagtgtggggcgtattcccctttatctgctggatacggacaatgaactcaacagcgagtttgaccgccctatcactcaccatctgtatggaggcgactgggagaatcggctaaaacaggaaatactgcttggcataggcgggatgataacgctgagagctttaggcataacgaaagatgtatatcactgtaatgaggggcatgccgcactgatcaatatccagcggctttgtgattacataaatggcggcttgaatttcgggcaggccatggagctggtacgtgcttcctcactttataccgtacatactcccgtacccgctggtcatgattattttgacgaagggcttttcaataaatatatgaagggatatcctggcaagttgggtataacctgggataacctgatggatctcgggcgtcacaatccgggagacaaggaggaacgtttctgcatgtctgtcttcgcctgcaagacctgccaggaggtaaacggtgtcagcaagttgcataaatcggtatcccagcaaatgtttgcgccgatctggaagggatacttcccggaagagaaccatgtgggttatgtaaccaacggggtacatctgcctacctggtgtgcggcagaatggaaaaagcttttcaaggacaattttgatgagaattttttctgcgaccagtccaatcagaaaatctgggaggccgtctatggcatcccagatgaagagatatggaatacccggttaaaacagaaagcaaaattgctggactatatcaaaagcaaatgcagcaaggactggctcaggagtcaggttgatccggcattgagcgtttccatttttgagagattcaatcccgatgctcttctaataggcttcggacgccgttttgctacatataagagggctcatcttctgttcacggatatagaccgacttgccaggattgtgaataatccgaaatatccggtacagttcatctttgcaggaaaagcccatcccaatgacggtgccgggcaggggctgatcaagcaaatcgtggaaatatcccggcgtccggaatttttaggtaaaatcatattcttggagaattacgacatggacctggcacgccatcttatctcgggggtggatatctggatgaacacccctacgcggttggcagaagcttcgggtacgtcgggcgagaaggcattgatgaacggtgtgcttaatttctccgtgctggacggttggtggtatgaaggataccgtaaggatgctggatgggcactgactgataaaaggacttatcagaatgaacagtaccaaaaccagctggatgccgaagccatctattatttgttggagcatgacatcctgccactgtattacgagtatggggggaagaactattcggaagactgggtcaagtatatcaagaactcaatcgcacaaatcgctccccattttaccatgaaaagacagttggacgactactatgacaggttctataacaagctgtcagagcatttccacattctggcagccgacaactttgcgaaggcgaaaatgatggctgactggaaagcaaacgtccgaagcagatgggatgccatagaaatcaaatccatagaggctgggaatgggctgaatgccacggttgaagccggaaaggaatatgaggtgacggttgtcgttgatgagaaaggcctggatgacgcaatcggaatagaatcggtcattatcaggcgtgaagacggtcaggatcacatatatgaggttattccccttttgccggtttccaagaatgggaatttatatacctttaaggcgacatccggtattttcaacgctggaagcttcaagcaggccttccgtatgtatcccaagaatgctttgttacctcaccgacaagatttctgttatgtacgatggttttaatgaacagtaaaaggatatgcaaaaacaacgtatgagcgggcaaaatcaaaaaacagataaacggatagcatggccgatcatcatcatgaacttcacgggagtgtatgactacgaggcgtttgcccggaacaataaatttatatggctggattgtcgtcatctttatggtacagatggctactgtgatagggagggggctttggctttgaaggggatgattgctgattatccggcggagggagtccatttcatcgattcaggcaattatcattatttgactaaattctggacagacaaacttgaaactccgttttcgctgattgtgttcgaccaccatcccgatatgcagccaccgttgtttgacaacatactttcttgcggaagttgggtaaaggatatattggaccataacaacaactgcaagaaagtaattatcgtaggtgcttcagacaaactgatacaggctgtgccgaaaggatatgaaagacaagttcggttttacagtgaaactacgctcatgcacgaagagggttggcagaacttttcttccggacatatcaacggaccggtttacatttccatagacaaggatgtcttgaagccggcttcggcagcaacaaactgggatcaaggttctctcagcttatgggaattggagaaactgctggctgttattcttcagaaagaacaggtagtgggcattgacatctgtggggaatgctccacaacactcaatctttttgaagaaaaacgggaaaccgtcatggatagccaggcaaacaaagaattgctcagatttatccggtcatcctccggccttcaatagaattagtttttttgttattataattatcatataaaaataaaataatttagctttatggaaacaattgttcgtagaattggacttgttgcacacgatgcaatgaaaaaagacatgatagagtgggttctctggaactcggaacgtctgataggacataaattctattgtacgggtacaaccggtacactaattaaaaaagcccttgaagaaaaacatcctgaaatcaaatgggatatcacaatcctgaaatctggtcctttaggaggtgaccagcaaattggttcgcggatcgtagaaggagaaatagactatctgttcttttttacagatccgatgacactacagccgcatgatacggatgtgaaagcattgaccagactggctggagttgaaaatattgttttctgctgtaaccgttcgactgcggaccacattattacgagtcccttattcactgacccaacttacgaacgtattcacccggattacaccaattacacgcagcgttttgaaaacaagggaatcatatctgaagcagtggagcaagtgaaaaagcggaggaataaaagtgagaataacatttctaaatgaactgtaataagtagtagaatatttataaggctatctaagaaacaagttgtttacatctttcagaataggtatcagctgaatagtaatctgctaaggttgtgtcaaaacgttggcacaacctcttttatattttacagttctgttatattttcttttggctatgctgctttttccaggggcagcggatttttccggttggcaagctttcctttaagcgtatagcctagccagtctgaacatgaagaatttcagatcagccacccctcttaactggcttcgaagagctttgattttagcattgaacgactccgctgaagcatttgtcaatcgttcttcaaaattttaggggaaatacctaaagatacaaaaaagccaactaattcgcaatacttttagtatgaattagttggctaattttataggatttactgaatatccctagttaaaacagctatgcacaattccttttattccgttttcaggtctatggcatacaaattgtcaataataccatctgctaagccaatgaccggaacatggatatactcagctttgacaatacctgcaattatcagaaatatcccagcggcgggaacaataacatctgcacggtcagttttcagattaaattcttccatgcgctgttcaagagttagaacttttaacttatcatacagctcctgcaaagaagtgattggcaaacgtgattgtttcttatcctttttatcagcaagacgataaagtttattaatatttccacccgaacctataatattgacaccttgaaaatcagcagttaaacgagtcaagtcacttttcatctgttcccaactaccttctcttacagaattgctcaacattcggacggtacctatattatatgatagagactgtaccaactctccgttgatgagaaaatttatttccgtacttcccccaccgacgtctacatatatatagtttccggcacggtcttccaaacactcgatatgattgttataaatcatacgtgcttcctcttgaccgttaatcacttcaatgttgattcccgtatctttccatacctttttgattacagacttgccattttgggcatcacgcatggcagaagtggcacaagccctatagtttgtcacttcataaattttcatcaattgtcggaaagccttcatcaacctgcgcaatttcatcacctttgcatccgacacttctcccaaggaaaaaacatcaaagcctaaacgtagaggtacacgcaggagtatcactttggaaaggcgcttattggctagattctcattattcttcacctttttgattaacaaccgcactgcgttagagccgatgtcaatagctgcgtaacatttactatcagtcattcgttatatgtgatttgtaatacttatatagttcttcttgcgagcgaaaagattcttcggtatccgttgtccaaaggcagttcttaccgcttccgtcgacaacgctaccctgacaattaccccggagtccaaaatcaatgactttccataaatcctccttgattcgagaatcataaacgggagtgattacttccaccctgttatccaagttgcgcggcatccagtccgccgaaccgataaaagtcttattctctccacccgctgcataaatcaaagaaatcttcaaaagatcgcagcttaaagaaaatgaacagatttgtatagtgatgaacaaaaaagaggtgcatcgtgcattacgacacaccttcttgttgatttatatctatataaacctataatttaaattagatattcaaacttttgatatcaatttgattgaatgtagataaaatataaagaacaagtctgatgaatcctcaaattcaataaattgactcatggccatcacaatctatttggctattcatgccaccgttattgcttattctaactcttcaaaagagtaggaacagcgtgcaggcaaaagatcagtccatgaattactatcgatagcatctcacagagaaatggtatatttcagtcctttatcgggagccacaataaagttcgttacctcgaaatttacatcgccacctttgataccctgtttaaacccgatacggacagtgtaacgcgtatgtggctttaaggtcatatcccggaaatacaccaataaagtgtcatgcgctgtctttttcagtttcaaaacaagatccgtcacattggtgatagagagcgtcactccttgctcattacgacttacctcttcaatcttcacgcacttttcaaaaaagggacgaagcaagtcttctcgtcctatcagcaactcatgaaaataagcagcagtacggcgattgtctaaagcttcgcggataccttgcaaagagcgttccttcgcaaagacaaacgtcatggtacggtgttctcctttctcaaagtcgtaatcagtctgaatcggctgatgaatatcggaagtaccgatcatcgtaaggtttttatccaaacaccactgaatggcttcaggcatatacaaatgaccgtttgccacttcgataccgtgcatacagccttcttgatagagtgctgtatgttctggccaccacttggtcgtatccggttgttgactatcccatccgggatggttccaaaacataaaagcgccctgctttttggcttcacgaaaagcatccttgtagtctttttgttccaatggattggaatcagacaagaagatggcattaaagtgtccgggtgccatggctcgcgtaatctcactgcccttaatcaaaagtatccccaacttctcagcttgttcccgacaaaggtcgaacgaacggttatgatccgaaacaacatcctgtttgtgagggcggtactcaatatgttctgtcagtgaaatggcatccagtccatcccggtaggcttcatctacacgcacggtaggccaaaccagaccatcggagaacacagagtgcatgtgaaagtcacacttcaacgtggtatatccgtccaaatcaggaacctgaatttcattccggcgttgcgcctgtccactcatcaagcaagtggtcaaaaggaatgcactcaccaatactttctttacttccatataatctattaatttaaatgatgaatttactatttccaagcagggtttagaggcaataaagcaggattatccgcataccgacaaagttccatttggctgattactgaatgctccatcaatccacatcctctccaaaaagacattggcgcagcgacggataaaagtggcacactacccatgccggaaaggacttttgctctatgattcatgtatttgatgatatatgcctgttattgatatggtggcaaaaataccggcatcatattacatagcagttaagtggcagaaacgtttcaatgacaaaataaagtacgtttttttacattaatcgattacaatccacctacccggaacctctccccgaactcctcatacttggcaacgataccttaatatatacgagcggtcatctttgacttaccggtttttttatgtaacattttcttaacgctttcgaatttggaacttaaccagtttcgctttccctgtaatacggatatgccttactttgcgaccgtttttaagagttattgactacttgtcaacaaaggatttttagttattaaatattgttatatgaaattacgttacttacagattgcatcgtctatctgtattacatgctgtcacttagggatgtctcatcctgctcttgcatcacagacttacagcaagatgttgaccaaagagtatgttgtgacaaagaagaatgtcaacggtaccattgttgacaaggatggaaacccactgattggagtaaccatctttgagaaaggtacagacaacggatgtatcacagatttcaacggccaataccagctctcgctatccaatcgggatgctgtcattgtcatctcctacgttggatacaagacacaggaactgaaaggagaccagctggtcgagaaaattgtgctcgaagaagatgcagttgcgctggatgagttggtcgttgtcggatacgccgtccagaaaaagaaagaactgaccggttcaacctcctcactcaaggccagcgacaaaaagctttcggtaacaaccagcttggaccagatgatgcaaggtaacctgagcggtgtaaacattacgaacgcatcaggtatgcccggtggagctgtccgtgtcagcatccgtggtgtagggtctatcaacggctcaaacgaaccattgttcgtcattgacggtatacctgtaagcaactcggacaattcaggcgtcaacggacgctttggtggtagcgtgcagaatccgctgtccatgctcaatcccaacgacatcgagtcaatagacgtactgaaggatgcagcggcaacggccatctatggttcgagagctaccaacggtgttgtgatggtcaccaccaagagaggaaagaaaggccaacggacaaccgtaaatcttagtgcttcatacggtttgcagtcacttcccaaggaaatcgaaatggctgactcggatctttaccttactgttcgtaacgaagccgtcaacaactacaatacccaaaacaacctgaaaccgggagacaacctctacaagactctggaagtcaacccccgtccgggacaacccgatacagactggatcgatctcattactcacgaccaagcagccgtacaaaactacgaggtttcggtttccagcggtagcgaaaagacgcgtttctactcttctttgggatacttcgaccaggaaggtattatccttacgaaccgattccggagatattcactccgcaccaatgtcgaccacgacatctccaacgccttccagactggggtgtccattgcactcagcaaaaccattaacaaccgcgttcccaatgacaacgtcggcaacggcatctttacacgctccatcgagcagcggccgtttgatgtgccgttcaaagaagatggaagatacatgattggaggcgtggatattccacgacacaacgggatccaggtcctaaatgaacaaaagtccaaaaacgaatggtacagagtgctggccaacgcctacctgaccatcaaactgttggaaggactggaatacaagctcagcctgagcggagacatccgctattcaaacgactatctgaagctgactaaggaccatccctacggcagtccgaaaggtgagattacagactatcgttcgatgatgcagaattatctgatcgataatacattgacttataccaaacagatcaaggacttcaatttcacggcattgggagggtactccatgcaagaaatcaacacagatgccagttctattgtcggcaaggacttcccgtcttcacaatttgactacatcaacgcggcaggtagaatcaacagcgcttctaccaccggaggaaagaatcgactcatctctaccttcttccgattgaacatgggttatgcggacagataccttttcaccttctctatccgtgcagacggttcatccaagttcgctgacggtaaccaatggggtaccttcccatcggtgtcaggtgcttggcgcatcagcaacgaatccttttttccaaaagacggaatcatctcggacctgaagctgcgtgccagctggggtatgaccggtaaccaggaaggaattggaaactatgactcccgttcactggcaaatggcggacacaactacaacggccaggacggcattgctatcaccaccctggccaatccggacttgaaatgggaaaagtccgaccagacaaacatcggtctggacctgtcgctgttcaatgacagagtcactgtcggtatggactatttcatcaagaacacgaaagacttgctttatgaccgcccgctgcatactacaactggattctcatccattacccaaaacatcggcagcatgcgaaacaccggtttcgaattcaatgtagagagtcacaacatcatgaacgaccggttcagctgggatacacagttcaacatctcaacgatcaagaacaagctgacctcactgattgatgaaaagcccattcctgtaggcaaccatgtccttcaggtgggacaacccatcggatccttctacatgtataaaatggatggtatctatcaagataatcaagaggttcctgaaaaactttatgccaagggggttcgtgccggtgacatcaagtatgcagacaaggacaatgatggtgatttgacacccgccgacaaggaaatcgtcggaaagccccttccggatttcttcggtggtctcaccaaccggttcagatacggcaatttcgacctgaccatcttcaacactttctccgttggcaacgatgtctatgctaccggtatgggtggtattgatgccgttggacacaacaactacggcatgcgtaaggacattgctgccaaccgatggaccggccccggcacaaacaactcgatacctcgtgccatgatcagcacgcacaacacacaggcatctacctacctgcttcatgatggctcatacttcaaattcaaggatgtgacactggggtatacccttccgtcaaacctgacccagaagctgaacatcagcaatatgcgtgtgtacctgtccgcacagaatctgtggaccatcagctcttatcctggatatgaccctgaagtcagctactcagtcaacaattccaagacaatgggcgaggatgccatgaccgttcctcagttgcgtacgtttgtctgcggcttcaatcttactttctaaatataattcatttataatcgatattcatcatgaaactaaatcatctgatatatacattaatgctgggcaccgcgttgggtaccagttcctgctcctggttggatctggaacctgcaacggccgtctcaccctccattctcggacaaggtgaagtggaacaactgctaaccggtacctaccgctcgttacagaacgacccgggtcgcgacacctgggtactctttgacatgcggggcgagaatctgatcaatacctacctgagcggttccaatgactttgtaaacaacgagataccctccaataacggtacgctgcttacgatgtggcgtggttactacaaggccatttacaatgccaataccaccctttccatcctttccaatttggagcccagtgaaaagaacacccatatagaggcacaggctcgtttcctccgggcatacgcctattactgtctggccacacgctgggatggtgttcccatcatcaaggacaataccctggagaacgtaaagcgtgacaaacagtccgctgtgttcaacttcatcaaggaagagttaagtttttgtatcgatgaaggacatttgaaaccttttggtgaaacttcgggcgcacccttcacggtaagcctcgaagcagcccaagctctgatggcacgcttggccctgacaaccggagatatggaaacggccaaaaatatggctgaaacgctgatcgcaaatcccaaattcaaactcagcgaaaactacgacaacatcttcacgacaaccaacaacagcgagataatcttcagtttccgcaacaacactagcgaaggaggccagaacttgtacgccctgttcaccacctacaactcaccgatgaaaggaagctggtttctctgcccgtctcccgaatcggagaaactgttcgaggatccggctgatacgcgcaacaacacctgcatcactacgctggagagcgtttccgaaacctatatcatcatgaacaagttcagagattttacgccgctcatcgtttcacgtattgcagaaatgtacctgattagtgcggaagcacaaggacggaacggactgaatagactgaacgagctgcgccgttcaagaggattgaatccgtacaacaactcggatattgcttcggaggaagactaccagaagaaagtagccctggaacgcagaaaggaactttactgtgagggcttcctgttttttgacctgattcgtaccaacaagatttccgaagaggtagtgtccatgaacggaaagacaaacctttatcttcccttgccggaatcagaggtgcaatacaatcccaacctcaacgaatataactgataaaccaatccctgttattcatcgttgccctgctcggtcgggatactgttggtttctgttgggacagcctgccaacctctgtttcgattggaatgtgaagggcaacggaaatagtcactatcgggcgttgggaataccccaacgcccaacttttaatggattctcatgaaaaaactgaaaaccgcctttatttccctactgtgcttgtcttgcatgacaatatccaacaagggatcagcttcaaacccggtactgcgtatttcggacgggtgggtggcagacaccattgcgccggcactgatacattaccgattcgccggatatgactccatcagccaagcgcaccaaaatgtagacgttctcgaggtcgacctgacctccccaagttatgatatacagcttgtttacgaagagcatggggattccctatcttctgtagcggaacgcaacaatgcggctgccgccatcaacggaacctacgaggccgaagcatcgttcatcaaaatcggaggtagactccttgcccaaaaccgtttggacagcacacacattcgatactggaaacacgaaggtgccttcctgttcgatgacgacaacaagaacatcgacatccgatttgccagcgactcgacttttctttcacaccccgcagcaaacattttatccggtgctcccatgttgatagacaacaacgatcctgtagggctgaattttaccggaaacgtagaaggaatggacctgaacaagcttgattacgaagacttcagaaggcaccagggagtgagacacccgcggacagcggtagcacttacagagcataagaaactgcttttgataaccgttgacggaagaagtacccaggcggcaggaatgtctgcaaacgaactgacccgatttctacttacttacttctgcccccaatcagccttgaacctggatggtggagggtccactaccatgtggattgcctcttcagagcagcgagtaggaggggtcgtgaaccatccgactgacaacaagaaattcgaccatgcgggacaacgcagagtaacctcgttcattgtcatcaaatcatctgaaaaccatgaataaatatctcagtttcatctttgcttcagtgctcacactcacgggcgtacagctttccaaagccagcaatccatcggattccctggccatcgtatcggccaaatgggagagaacatcttcactgcaaggcatccagttgaaacaagcttcgatagaaggcctgtttggaggcaagcaatccatcagcatcctgaccattggaagagcggaaggctatacagcctttattgctacgacggactcgctgaccaccactagccaattggctgaacaaagccgttcttctgcagccataaacgggtcgtacttcagtatcaaggaaggcttctctacctgttacctccgtaaaaatgaagcggtaatagatacgacaactaccgaagaaaggcatttgcgtgtcaatggtgccgtacacatggtggataacaatatccggatcataccatggaacgacgaaaatgagaagaaagggttcccgctggatggggatatacttgcgtccggaccgctcttgatgcaggacggcaagacgtgtgacttcacgacgatagatcgggaattctcagagaccagacatcccagaagtgccattgcactcacaaaagaaggtgacataatgctggtagcggtagatggaagggcagaagggcacgcagatggaatgtccattgcagaacttgcctatcttttgcgaattctgaaggcacattgcgcacttaatctggatggaggcggttctaccaccttatgggtgaatggtcaagtggtcaaccacccaagcgacaacaagaaattcgacaacaaaggagaaagaaaagtccacaacatcatagccgttcgaagattgacaaatccatagagtacaacatgcttgctcacagacaaatcggggagtactgcatcaatcatgcaggaacagtctgaacagggaggccctcgaatggcttgaaaggacggggaacgggaaggtgcacgggaccacccgtctttttccccgggaagagtttgccgtggaaaaaggctttctcatgccctatcatgggacgccacaaccaccgcaggaggagatgagggaataccatgtacgcaaggacaatacagtgcagtacagggggaattattacagcctgccatgcggaacttaccggagcgggcagacaaccgtctggctgcaggaaacggaagggaatgtggagctgtacaacaaggatacggggaaactcatctgccggcatgcgctctgtaccagaaagggaaggaccgtttatgacgactcccacagaaaaccgagaaacgccggagtgaagatagccgaacgcatccttgtccatgtgtcgggcaacagggaggtagccatgtggatggataatctgaaaaggaggaaggaacgttattaacgtgagttcgaaataagaataaatatatttcacttataattagaaacatagcgataaaagtattaaatttatagtgctgaattataacatttaaacgattaccactatgtttccagagtctaaagttacagagatttattgtatggccgatgatttttgcaaggaatttacattgcaacaggaaaaatatatgattaaggatatgaagaccatgcatcgtaacaaacccaaccgtatgagtgatgcagagattatggttattctaatcctgtttcactccggtggtttccgttgtttcaagcattactacaaggagtatgtctgtaaacatctgaaacacctttttcctcgtcaggtttcttataaccgttttgtggaactggagaaggaagtattgcttcccatgaccatattcatcaaaagagtactgctgggaacttgtaccggcatcagtttcgttgattccactcccttatgtgtatgtcgtaaccaaagaatcttgattcataagacatttgaagggcttgccgagcgtggaagatgttctatgggatggttcttcggattcaagctgcatctgataatcaatgacaagggtgaaatcctcaatttcatgttcacgcctggaaacgtggatgaccgggaaccgttgaaacagggtaggtttctggaaaacatcaaaggaaaactatgtgcagacaagggatatataggtcaggctctgtttgaaaaccttttccttaatggcatacaacttgttactaaagttaaaaataatatgaggaactcactgatgagtattgccgacaagattttgctaagaaaaagagccttgattgaaacggtcaatgacgaactgaagaacatcgcacagattgaacactcaagacatcgttcattcagtaactttatagccaactccttgtcggctatcgcggcatactgcttttttgaaaaaaagcccgccattgacgtaaagtttgtcaatgacggacaacttgctattttttgattttatttcgaactcacgtttattacagggataatctggaggtgatcctgcgcataattcccggatatgacaagaatacactgatagaggccatacggatatgtctggacaaaggcatctataacggggactcggttaaaagcctgtgtgaatatgtgtgcaggggaaaggaaaatggaacagaaatatacggactggaggatcacctgccccgacaaggcggattgatacagtcttataacgaaatactcagggattatgacaagacataagaaggaactcatggaatgtgcacgtatgctcaagctgggcaatctgaccgaacatctggaggaactgctgcatcaggcccaggaaaagcagctgacctatccggagtttctactcgcctgcctcagggaggaggtccggaccagggagaaccggaaatatttgtgtcgtttgaaagcggccgggcttcctgcaaggcatgatctggaccgttacgactttacccggacggaaggaatcgactccagaaagctgcgcgaactgcgcgagctggtatgggtgggacaggcatacaacctgcttctggcaggcggttccggaacaggaaagacctatattgccgccggacttgtccatgaggcggtgaaagccggatacagggcatatatggttacgctggaggaccttctgacctgtctgaagacaagggatgtttccaggcatgcgatgaaaacctacaaacggatcatgaaggcacagctgctggccattgacaatgccacactctttcccttgaaaagagaagatatcatgttgctgttcaaactggtgaatgagtttcaggaaaagacatcgcttatcgttacagccaactactcccttacagagtggctggcaataccgggagaggaagctgtcgcagcggcattgcttgacagactgctctactgttgtgagattatacaactgtcaagaaacagctatcggatggaaaacaggaaaacaatttttagcaatcggagtgaagatacagacactttaaaagagttaacaactgtaaagtaatatcctgctaaaagtgggatatattaaattacataaaaatgaggtgtgtaaatttgcaaggtacatgtgtgccccactggtatgatccctgtcttttataatttaaagtcaagcaagagaggaaagtaaatagggtttagtttatgcatagtaaatgtaagatttacttgcaacaggtaaaaagatttttaaggttaacaatgtatgcggcatgctaaaaagtgattattatgttggaagttgttctatataagtatttactttttgtcgttcaaaagatatgacttcaatatagtaaacatacactttttagtttgcccttatttttcgaataagatgagtgagtcataaacatcagttacatattatgaatactttcggctctatcacgtatgaattttttaacaataaaaagaactatcattttgatttaacaggagcttttagtaacattattgaagaaagtgaagcaatagaatatgatgatgacgacgatgaggatgaattcgatgatgatgacgatgactaacatctcattaatccatagcttttaagtttattaaagaaacaggtcaggacgctatatcctgacctgtttttgatgttagttaagtcctaatagttagtttgctttatttgctctcagcattagctattgatgcacgtactctgcttaatgtttccaatgtcatctgaagatatgaagcaatcattgtcaaaggtgctcttctagttatttcaggaaaatgttgctgtaatctagcgtatctgtcatttgctgattcgaaacgtaaaatgtcagcctttaattgtgataacattaaggaattttcaaaaaaactccgatatagataagctatatcaccattagcatcagaaagttcttccattatatcacgcggaatttcccataaaacactgttttctacagcatccatcataagatgtgttggctctcggttaaaatagctgtcaatacaccagacaacatctttttcacatgctaaatgttctatcacatccttatcatgctttaggtagtgctgtctaataaatcccttttctatataaaataggcaattacagatatcaccttcatttagaattatatcacctttttgatatttcttaggctgaataatatctgcaaaaaggcgaatattctccaacttaagtttgcgattagggcatgtttcagctataatctgttttgcaatgtcaaattgaatactcataggctaaagttatttatatccaacattttgtttcaattttgggttcaagtctatacttttttgtggaataggaaaaactgtggtatacccatttttctcatcagccagttggactcgctgatcgtatgatttgtgataaactccaaaacgcaccatatcttgtcgtcgccagccttcccatactaactccaacaaacgctctttcaatatgttctcaagcgtagcttctcgatatggcataccaacacgacctcggacttcgttcaactccaacgagccatcctcaccattacgtacctttgcctcggacttcatcaggagagcatcggcatagcggaatagcacgatgtcgttatccggttgtctaccgtcggaatgtgaggtcctatcaacctcatattttgccatacgagcaccagctgtcttgacataggagcttcccgtaagattcaactttagctccaatgggaaatactccaactgctgtccattgtccatcattacaggctttccatcaacctctacgatgccggcatagaagttcttttcaaagcgagcatctacatcatctgtgccgtatccgttggctaagactgttgagatattggcactggtaccattttccgatgagccccccaacgcaccgccatggttgtagtgtcgtgatcggaagagataccagaactgcgcagcatagaggttcttatccaacggaatggtgaatatgttttcgttggagttctcgttatgcacagagaaattatagctataatcgtcctccaaccgataacctacctcggcaagtttattgcaatatttgatacaggtctgccaagcgttgagtttctcaccatcgacggtgaaaaatatctctttaccgttccgtggaacgccatcagtccaattatcatcacaatatatctcggcattaagagccaacttagccaaaaggaaattagctacaggtgttgttatacgaccatagtagttacccatcttattactacgctcatttggcaacaactcggcaacctcctgcaactcattcacgataaaacggaaaacctcgctacgctcgctctgcacaacttcatcctgcggttgttcataggatgttacgatgggcactctgccatacatatccataatgtagtagtagaaaagtgctctcagagctcgcacctcagcttcgtaggccactctctgctcctcagataggttatggctatacttatcgatgatatgcagagatttgttcgataacacaacaaccttgtagaggtatttccaagtattgtagagtggtaaatcattaggactccacttatgctgatacatattcgtccacaaacctccatcgtaccagtcgccaccacgaataggtatcatggcttcgtctgtagtaagtgtgttatagtcataaatcccacgacaggtcccctgtaaaccctcactgtctgcactgccaccaatgtaattgtagagcacagccactgcattaatatatatgttgttggcattgttgtaaatgtcttcttcataaagttgatctctagggtcttcagtaagacaagaggtcatcatcgttgccaaagcaaccatcaatatgtttatatatcttttcataactgtaagcggttagaattgaatactaagacctaacgaataggtacgatataaaggataggtgcgtttgtcgtcaatgcccaaagtgttgcttactacataactgtttatcattggagtaagaccgctatagcctgtgattgttgcaaggttgctaatgcctgccgaaagacgcaatgacttcacagccttggatttcattggaatattgtagcctatggtaatatgttcaatatttacatagtcacctttttccaaccaatagtctgaaacattctgatcaataatatttttttcaggagcacccttcaatacattgtagtcagggaatatagacatattggtataagccaagcccgtgccattgaatatcttatgaccgaaagcaccatttatctgcatggcaatatcaaaggacttgtaacggaaactgatgtttgatccaatagttaccttgggggttgcctgacctgctatatacctgtctccgccatcgctaaaatcaatctcgccatcatcattcaaatcttcaatatcgtaactgtagccaccaagttcattttctttaagccctttgcagtgaggtagatagaatacccccaatggctgacctacaatctgatatactacattattgtctccaccgttctgacctgcaccataaagcgagccaatcggagtaatatctgaagctgtcatatgcataccattatactctccactaagcgaaagtaacttattcttctggtaggacatattgaagttgatattcatctccatatcctttcgttgaatgggaactaccgagattcctagttcgacaccctggttagacatcgagccgatatttgccatcagtttatcgaacgcaaaggtcggaacgggaacatcatactcatagagcatatccgttgtctttgagtaatataattccgaggtaagcatcaaccgattatcccatatacctaagtcaaaaccgatattaaatgttgaacgagtctcccacttaaggtccggattcgtgttgcgtatacttcccattgttacggtaggtgcaccgttgatggatacgataccattctcctttacggtattaagtgttgtataggatgttatacctccaagatttcctgaccgaccatatccggttcttagtttcaacattgttataaagtcagtatcagagaggaagccttctttttttacatcccaacccagtgatactgatgggaagaatccgaaagtattgttatcgcttaccattgaagagccatctccacggagtgctgccgcaatagaatatctatccttgtaactatatgtgacactacccattattgaagcaagtgacgggtcttcatagctactgctcgtaccaccgaaaggacgcgatgatgttgctccgatgttattataggagaaatcatttgttgttattccttttgcctgcacccataaaccagtccttacctgtttaagatattctgcgccaacaacagcatcaaggtgtgagtctccccaagcattgttatatgagagggacacatttgtaaagtagtcttcacccttgaactctccacgataaacattgccttgcgcccacacccatgtaggacaaaattgagcatttcccgtagatgaatatgaataagagccgaaagccgacaatatcaaattgtcaaggatattaaatttcagccccaaatgtgtattgaaattccgttcttcggagtcatttttctcatagaggagtgctccggggtggttgatgtgtgatgcagccgagttcttcacccagttgccattaacatcagttcctgctggatatgtaggattctgtgcagctgccgagtaaaacagcattcgtgtatcgaaaatgtcgtgtatctttgacgagtagccatatacaccaaaatcgccaactaagcgaccatcgaaagccttttgtgtagcatcaagttttaccactaaatttcggtaatcgttaactttgacaattgtattatgatccataaaaccgaacgatgctcgatagtttgagttttccgaaccaccgctaaaagccaagtgatgctgatgtatcaagcccgtacgagtaattacatcgtgaaaattggtgttgtagccaccattattgtaatctaatccaagtgcctctgctgtagctatatactccgggccgttgagcatttgcagatgtttatacattgactcgaatccgtagttgccatcatatgatatttcgaaacctcgccccgttcctttcttggtcttaatctcaattacacctgaagcaccacgggaaccgtacattgccgtttcggtagcattcttcaaaatagtgaaactctcgatgtctgcgggatatatggtagatagcgtagcgatgtcagatgtcactccgtcaataattactaacgggtcattgccacccataatggatgtggtaccacgcacacggatactattcagcatagcgagcctgtcagtcccattagtggtgacgttcacaccggcagactgaccactcaatacatccaaagcattattcaatggtcccttcttgatattctcgggcctgatatgctctaatgatttagtcgccgaaatggtatcttgtttctctctgatattctgtacttgtgcatcaattttttgagcactacagatgaagaacattatgacaagacaaagactgactcttcccatcttgattcgttaaatctctgtagattccccagaccagacagttaataaatcttatacgcaatgtattataaagagggggattgggaatctgtactatttccctgcctgtccgtccgcttagccattgtatatttttttctgttatttcatatcagtgatgctgataatccaggcaagaacagagtaaacatctacctcttttatacataaatcctttccaaggactttataagcgcaaccattaactatattacattacaaaggtaacaataatttgtcatttgaagaaatttagaaaaaagaaaaagtcattatgcgtgatattttttatttaattacgacatttatcaaatacaaaaaatcatagaaggacaaaaatctttaaatgatttgattataaacaaactttaaatagttaaattgcaataatactataccatggttgttctttaccttaatgtaatactactgttatatatctggtcatttatctccttttgtcggatgcaaaggttgccaaacctcttttagaaaacgaaaagttcaagcggtaaaccatttggagcagtttcgtcctccgttggagagtaaacagctccaaaaccttttcttattcatcggcttggctgaaaactgcatccggcaacggagataaacgactgacgaaataatagcataaaacagcatagcccccccttaataaggcaattttatcaatgctgttttcattcttttcagaggactattattttcgacagagagaaatttggcaagcggcagatttcactccctcaaaaataatagatttgaattgctgtcctcttgcctttattggaaattgtagtacctttgtagtggcttgtgcgaacgagccaagcaatgtggaaagatgggaacatcgaaccatcaataaagtaccgaaaagagggaaaataccctctaccaccgctctttgagtgttaagaaataataaaaaggttaaatcttcaccttttagaatgtacccctaaaggttatgcctgtagatactaattgaaaagtgcgccaatattccagttgaaaattgcgccaccataggataagtataatgacctttgtataatccaaatgcaaaggtaaaatgaagactatggtagaaagacaatcaataatacacatgtatagagtatgcggttatagcaaacggcgtatctctcgtgaacttcatgtcagccgtcataccgttgacaatattctttcaaagtacgaatcagccatccgcacggacaatccagaagaggctttgagtgatttgcttaccatccagcccaggtatgacagttccagacgccgtcctcgccggctcacacaagagattaaggataagataggattttgcctgaagaagaatgccgttaagatagctaccggacttcgcaaacagcgcatgttgaaaaaggatatccaccagtttctgttatctcaaggatacaccatcagttacgccacagtatgcagttatataaaaaatatagagtcatacaaagagaagaaaaagagcgaagcctttatccggttgttctatgagcctggatgcattgccgagtttgactggggtgaagttcttctttttattgacggcgtcaaaaccaagttttatctggccgtattcactttcgggcatagcaatggcagatacgcctatcttttcaggcatcagaatacgcttgccttcatggaatcccaccgtaactttttcagggatatacatggtgtccccgccatgatggtctatgacaatatgcgtgtagccgtcaagagctttgtcggtggtgataagaaacctacagaagctttgatgaagatgtccggtttctattgttttgagtaccgtttctgtaatgtacgggccggatgggagaaaggacatgtggagcgcagcgtggaatatgtcagaaggaaagctttctgcctgacagaccattttggtgatatacattctgcccaggagcatttaaaccgggtatgtatgcaggtcaacaacgagcaaggcagtctttcaacagcggagaaaacatcacgtctggaagctgacctgtcatcgctgaagccttttcccggtaatctgggctgttttgaggtctatgagtacattgtggataaatggtcaactatcagcatgaaaaatgttcattattccgtacctgattctcttgtgggagaaaaagtacatgtcaaggtttatagtgaaaaaatcgtcatcctgcacgggaaggagaaagtggcctctcatcaacgcagttattgcggtggagactggtgcatcaagctggagcactatttgcgtacactttcccgtaaaccgggggcattgccccactctgtggtttggcaaagagcaccggaagaactgagaaggctgtatgacatccatttcaaggaggacaacaggacgtttgttctgttgctggactatgcccgaaaaaatggattttccggaacggacattgtcacggcatgcaaggagctgaccggacgtggtgtcagaaagatatctccggaccaggtaaaggccatgctgcatggtagcgtacagggagagacagaagaaaccatggaaccgcctgttctcccggcacaacaggagaatatagaaagagaagctgtggatatgcttgaaggcatcacggcgctcatgacaggatacaatgaagtgcatgatataataccaaccatttaagtttataatatatgaaatcagaaaaagaaaccatttatgactatgctgcagaactgaagcttctggcctttaaagaggaactggaatgcaccctttcattggcagctgaagaaaactggaaccatctgcagttcttgacggaattgcttggaaaggaaagcgccaggagaagggagtgtagaagaagatcaaggataagatctgcgggatttccacaaatgaagtatctgcatgagcttgttatggaagacatgcccaaagaggcacaggtaatattacctgaattggagacactggacttcatcagacagggaagaaacctggtcctgtatggaaatccgggaacgggaaagacgcatattgctacggctttaggaataaaggcctgccaacaggactttaccgtattgtttacttcagtgccggtcctgcttacccagataagggaggctaaatcagcaaagacactgaggacgctacaattaaggtttgaaaaatacgatctggtcatctgtgatgagttcggatatgtcagttgtgacaaggaaggaggagaactgctttttaaccacctgtcgttaagagccggaaaaaaggctacaatcattactactaatttggcttttaacagatggaatgaaatcataaaggacaaggtgcttgtggcggcaatggttgacaggcttacacataaagcttatctggttaatatgaccggactgtcttataggcttaaggaaacacaaaaaatgagacaagataaatgaatattttaaacttatagtaattttgtaacaagttatggatggagctcttttcaattagaatacagcgcacttttcaattagtatctacatgtgatgaggataatcaatatcgttatggttttgaagctgacaattcatcggtacattcggaatggctctatcaaaaagctaataagaaaagggctaaggaggtggaattattctaccgggaaaaagacagttttgatattcataccaagtttgccgttggtaaagagcttgcaggtaaacgaatggtgagagcaaatgcactattactttctgttgcggcacaattcaatgatccgacggcagtggagatcatgaaatggttgaacgataccactattatttcaggttctaatgatgagaaaatatggaatactgccaccatccaactggatgacatcagaatgaaacagcgaattgtggagttttcccgttatgctgatttaggtattgaaaatattgaaaaaatagataatactattgtcagtatgcatacacaatacgatgatgaaggtaatgaagtcaaagctgttaccttcccattcaggaaaaatgaatcggaaggtacaataaagtatttttctttagcatatcccattattgatgctttggataatgggaagcgtctgattatagacgaatttgattccaaaatgcatccacttcttacgtgtagaattattaccttgtttaattcaaaagaaacaaatccgaaaaatgcccaattgattttcactacccacgatacaaacttgttgagtgctaatatattccgacgagatcagatttggtttacacaaaaagaccgttatggagcaaccgaactttattcattggcagagtataaagttcgtaatgatgcttcgtttgaaaaagattacctgtccggaaagtatggagctattccaattgtcggagatttaacccgtttgtttaatacgcaagaaaaataaactatggcggctacaaaaaggaaaaatatgaatccgcgtatcgaaagaaagataacccgtatcagtggtgtgcgtgaagtgaaacaaacatttctgattatttgcgagggggttaatactgaaccagactactttaatgccttccgcttgacttctgccactgtgaaagctatcggccaaggcatggggacattagcattagtacagaaagctatcaatataaaagagcaggaaaggcaaagatgaaggacatacaatcagaattgggtggtctttgacaaagatgattttccagaaaatgactttaactccgcaatcctgtcagctcgccagaatggttttgaagtggcttatagcaaccaggcttttgaattttggttcttgcttcacttcaatctgtatcagggggctttgcatcgttccagatatgaaaaaatgttgagtactttgctcggatttgcttatacaaagaagtcgggcgtaagctctaaaatgtttaatgctttatttcttaaacaagaacaagccattaatcacgctaaaactatcatgaaacaatttgatgggaataatccggcacaacaagagtcttctactactgtttataggcttgtagaagaattgaataattttttatagaaagccaaataattggggcgaagttgcctttgtctggttgttgagggatttggcgtggattcttaataactaatatttaccgataaaacttatctcctcatttcctgtatcaggaaatgaggctgaatgcattgtggctgtcctattcggattgtagccttcattaataataatctaaaattttgatgaaactagtagttaccggcacccgtggtatccccgatatcatgggtggcgtagagacgcattgcgaggaactgtttccccgcattgcggccaaaggtgtggacaccactctcatccgccgcaaagattatgtgagagattctctcaccgagtggaagggggtgaagctggtggatatcagcgcaccgaaaaggaaatcatacgaagcggttgtccatacgtttcgggctgtaaacaaggcgaaaaagctgggagcggatgtggtgcatatccatgccatcgggcctgcgctgttagtgccatacgccaagatgctcggcatgaaggtggtgttcacgcatcacgggcccgactatgaccgtgacaagtggggctttgccgccaaaagtgtgctgaaactgggggagcggttggggtgcaggtttgcagatgatgtaatcgtcatatctgaagtaattcaggatctgattgcccggaagtaccatcggcgtgagagggtacatctgatttacaatggtgtgccgaagcctgaaatttgcgactatcccgaatactttgaagaactgggtattgagaaaggaaagtacatccttggcatgtgtcgttttgtgccggagaaaaacctgcatcacctgatagaagctttcaagaagttggaagctggagattgtaagttagtgctggcgggcgatacggattttgaagatgaatattcactgggattgaaaaagatggcgcaagaggcaggcgtggtgctgacaggattcgtgaaaggacataagttgcactcgttgctgacaaatgctcgctgttattgcctgccttcatcgcacgaagggttgcctattgcattattggaggccatgagttatcacttgccggtggtggtgagtaatattcctgccaatctggaggtaggcctttcttctgactgctattttcattgtggagatgtggatgctcttgccgctcgattgcagaaggtgatagacgaggattatcatagtgtgcagtatgacatggctccgtatgattgggacaagattgcaaagcaggtgatgggagtttatgagggtttgttgaaataagaataaaactgatgatgataaagaagttgatttgtgcggcggcattattgatggtagcaggtttgcagcatacgcgggctcaatatgtatatggcaccacggggcttcttcacgcccccagcgcggatatgcagcgcgacaagacttttctgtgcgggttttcctatctgcaagtggcggctaccccgaagcattggaattatgacacgtggaattactacataaacatcaccctttttccgtggctggaagtgggctatacctgtacgctgcacaaaataggattgccccagtatggttattcatataagttccgcaatcaggaccgccagttttccgcccggctgcgtgtatggaaggaaggatggtggaaggagtggacaccgcagattgtggtgggggcgaacgatccttccaccaacgatgtgctgggcgaccccaataaggacgattatggttttacgggtacgtcttcggtgggtaacggacactggaaccgctattacatagttgccaccaagcacttcggggtgaagaatgtgggggagttggggatgcacttcggttatgtctataacaagcgtctggattatcaccggaacggacctgtggcgggggtgaattttcagtttgccctgccggctacctctttttggatgaaggctgtgaatgggctgaatgtgatagcggaatacgatagttattcggtgaattgtggtatcgggtataacttttggaaggattatattagtggtgtggtggaactgacccaatgtaagtatcccagtgcagggatggtattcaggatacatctgaaataagggatgatgtatggcaagaaacgacggtctccgtgactaccagcaggagatgaagctccgcctctttgaagagtgggagcttcaccggagtgtgatggtacaaatgcctacaggcacgggaaagacacatctgctggctgcggtggtgaaagagtttctctgtggtggcggtgtcggtatgcgggtgtggatagtggcacaccgcagggagctggtggagcagatagaggaaaccgtagcccggtatggaatgggaaaagaaccggacaagtcggcaaagaacggaaggacggggaaagacagtatgccggaagaatccgggagggtgagggtattttccatccagtggttgtcacgaaaccggaagattatggacggacggccggatttgatcgtcattgacgaggcgcatcatgccctggcggaaacctaccgggagctttggaagagatatccggaggtgaggaaactgggcatgactgctaccccctgccggctgaaccgcaagggattcacggatttgtttgataccctgattacctcatggagcattgcggaatttatcgggaggggctggttatcgtcctttgactatgtgtccatccgtgcgaacagcagggaacagcggctggttgactcgttgaagaagcggggtgcggacggggattaccaggtgaaggaaatgaatgcggtgctgaaccgggaaaccggtatccgccaattgtatgagagcgtccgtcgatatgccgctgggaagaaagggatagtctatgccgtgagcatcgcacacgcccgacagattgcggcttattacagcctgcatggcgtggagtctgttgctatcgacagcaggacccccgctctggaacgcaaggaactggtagaggatttcaggcggggaaagatcagcgtgttggtcaatgtggatattttttccgaaggttttgactgtcccgatgtggagttcgtgcagctggcacgtcccacgctttcgttggcgaaatacctgcaacaggtgggacgggggctgcggaagtcggataataaggaatcatgtatgctgatagataatgtgggcttgcaccggatattcggtctgcctgtccgtgaccgtgactgggaggcgatgttcgaaggacggatggcgggaaatgctcagccctggacacggatggagaacagcgggctgtctgtgtcttgctctctatcggaagatagcaaacagaatgaaggactggaaattgtgatgacacacaactgtctgctggatgctattcggaaaggggatttgatttgtttgggaggaggtggtccggtcggtggggagcaacggactgctttgaaagcctgtcatgaccggcagagtggtttgtggggcttgaggtgcgggaacaaaatcacagtgattcctcaataccgggaagtatttgatatttgtgcaaaccgggctgctgtccgttttgaggacggccggacaggagtggtggatgattccggaactcccctgatggtaacagaccgctgccggagattgagattcctgaagggagaacttctttctgtcaccaaagaggatgggagtgactgttataccgatttgaagacaaacagaacttatcaggagaggccggtggttttttcatacggcggcatagagctgctgcgggtgggggagactttccatagccgcacgcggaaggcgtatgcctctatgcatggtttgcacaaagacagtctttgtttttatggtttctacttgaagataccggattaccgtgttccgaagtcttgccggctagttgatcctgtgtggtctgctatatttgatgtcttcgcctgcgtgctggaaggggatgatgaagaggtgtactggtgttgtggttgtttggcggatcggagcatcgtggtgatggacggggaaggaaactattatcatgtggagaaaggaaaggggaagcggtatatagcttgtaatgttcctaaggcgggcgaggcggattttgcctccgtggtggaaggtctgaggaaggaagccgggcggcgtgcggagagcgtacagcgggaacggcaacagaatgaggaagagaaaaggcggaagaggctggaggaaataaaagatgtccttcctttccggatggggatgaagtgggggctgaaatggggagatcgtatcgttgtgcctccctgctaccggaatatctgtgttcccgtaggcggttattgtgcttttgaagggaatgcctgccagtggggagtaatggcgctggatggaaaagtggtggtggaggccagatatcagaaggtggagatagaaaaggatggaacggtgcatctgaccatcattccgggtaaggtaaagaccatcaacctttgaagggccttgaagagaacagaaaatgaaacggaacaatgatccggaagtaagataatatattgaaaaaaagagaagctgtctcaaacttgaattacaagatgagacagcttcttttttattgtttcatttcacgcaacgctttacataattgatccgggcaggaggtggagcggtttccgcattttacaccttccagtttctgtaagacctcttccactttcattcctttcaccaatcggctgataccttgtaagtttccattgcatccgccccaaaagaaaacttgttgaataacgtcatcttctacttccacttcgatgtggctgctgcaagtgccttgcgtcttataggttattttcattttattcttcctcttcagatgcaggtttcatgtttgtataaacggtctgaacatcatcaaattcttccagacgctctaccatcttgtctagagtttcacgttgttcaggagtcacatcttttaagtcattgggaatatatgtgaaatcaccacccacttcttcgaaaccacattcttccaagtgtttctgaattgctgcgtagctcttcggatcaccatagatggtgatagttccttcttcttcatcttcgtcgaactcatcctctacattatagtcaatcaaatccaggatcagttcttccatatccattccttctttcttcttgaaagtaaatacacatttatggtcgaacaagaaagctaaggaaccggtagtacccaagtttccaccgaatttgttaaatactgaacgcacatctgctacggtacgggtagtgttgtctgtcaatgtatcaacaaatacagctactccgtgaggaccatatccttcgtaagtcatacctttgtagtcactggtatctttacccattgcattcttaatggcgcgttcaatgttatccttcggcatgttttcacgcttacaagtagcgatcacaccacgtagggtcgggttattttcgggttccggaccacctgcttttacagctatagcgatttgtttacccagtcttgtaaatgttttggccatgtggccccatcttttcagctttgtagcttttctatattcaaatgctcttcccattggattgtagttttataatggttatttttattattatcttagttttgcacctagtttgttttccaggttagcaatcagtttggacatgatcttgtcaatctgtttgtcgttcagtgttgcgctttcatcctgtaacaagaagctcactgcataactttttttacccggttccagattcttgccttcataaacatcaaacaattctacttctttcagcagtttcttttcagtctcataggctattttttcgatttctgcaaactgtatgttcttgtcaatcaacaaagccaagtcacgtttcacagccgggaacttggaaagttctttaaagttgactttagccgacttgatggctttcatcagttctttccagttgatttctgcataatatacctcattgtctatatcgaatgctttttgaatcttcttgctgatgatgccgaaggtggccaataacttgccgccacgtgtgtgtacgctgatggctgttgaatagatatcgttggtcaggttgccgaataccacgttgccgaaattcaatcccaaacgggtaaagatgttcagcacgtatgcttttaattcgtaaacactgctgttttcatcgggatgggcccatgaattgctgacgcgtttgccggttacccacaatcctaaatgatattcttcagcataagccgcaagcactttttccgggtttttcttttctgcattataaaaatagcagttaccgaattcaaagaatttcaaatcggcgttcttacgattggcattgtgctggatactttccaaaccaccgaataacaaagtttgacgcatcacgttcaaatcgttactcaatgggttcatcaagtaaaccaaattttcgttcttgtatgtttccgacccttcgtaataggaagcggcggtcagtgaattgttcagtatttcattgaaaccacaacctaccagttgctctgaaatcagattttgtaatttctgggagtaatccacttcacctttggtggtcaggctggatttcaaggtagtaggaatctccacattattatatccgtagatacggagaatgtcttctactacatcgcaatcacgttgcacatccacacgataggggggaacttgtaaagtcaagccttcgggtgtttcgtttacaatcttcatttcaagactggtgacaatgctctttatggtttccaccggtatggtttttcctatcagtgagtggactttctcataattcagctctactgtaaaatcggctatcggggcagggtagttgtctttaatttcagaagaaatagtacctcctgccagttcttgaaccagtaaagccgcttctttcaatgcataaatagttccgttggggtcaataccacgttcgaaacggaaagaagagtctgtgctcaatccatggcgacgggctgttttacgtacccaagtcgggttgaaataagcgctttccaaaaatacatctactgtctgctcggttgttcccgaatccagaccaccgaatacgccggcaatgcacatcggttcttctgtgttgcatatcatcaggtccttgtcggataatttgcgttccacttcgtccaaagtaacgaatgtagtaccttcggcaacagtcttcactacaatcttaccacctttaatcttatctgcatcaaaacagtgcaggggctggccgtatgcgtgaaggatgtagttggtgatatccacgatattattgataggacgtactccaatcaggcgtaatttgttttgcagccattcgggactctcttttacagttaccccttttatggaaactccggcataacgcggacatgcttccgtattctctacttcaatggcgatgtccatatcatggttatccactttaaacgcttctacagacggacgttttaaagtggcttgtttgccgttttgaatcaggtaggcatacagatctcgggccacgccgtaatgtgagcaggcgtccgcacggttcggggtgatatccacttccagtacgtattcgcttttgatattgaaataatctttagcgggagtacccggaacagcatccgccggcagtacgatgataccttcgtggctgtttccgataccgatttcgtcttcggcacagatcatacccatagattcaattccgcggagctttgatttcttgatggtaaaacattcttcgccatcgtatagcttggtgcccaatgtggcaaccaccactttctgtccggcagctacgttagcggctccacagacaatctgtaccggttcgccttgtcccaaattcacagtagtaacatgcatgtggtctgaattgggatgaggttcgcaagtcagcacttcgccgatgacaataccttccagaccacctttaattgtttggatttcttctacgcctccggtttccaaaccgatggaagtcagcgcctcggccacttcatccggtgtcaaatcgaagttgacgtattctttcagccaattataagagatattcatatatgatattttttatgtatttcaaaatgacctgcaaatttagtaattattttcttttatcctgttatttatccatcacagattactcagattaacacagatttttctttgagggaaataatccgtgttaattctgtgagggataaataaatgtcagaacggtaaaggtccttcgggaataggggctccgaacggattattgtcggcaggtgcggcatcaggagatgggggaggtacactgttgccgccaccgttcattttggaacggataatacccggtgcctcacccggcataggcacgatgacatcatcgtccggattctggaagcgggcgaattcgccacggaaacgcagcagtacatcacctacggcaccgttacggtgcttggcgataatgatttctgccataccgtgcaagtcgttccctttttcatccgagtagattttatagtattccgggcggtggataaagcataccatatcggcatcctgctcaatagctccggattcacggaggtcactgagctggggacgttttccgtcaataccctcacgactttccacaccacggttcagctggctcagtgcgatgatggggatgttcagttctttggctaaccccttcagtgaacgtgaaatggtactgacctcttcctgacggctaccgaatgacattccactggcattcattaactgaaggtagtcaatgataatgatttttactccatgctcgcgtacaagccgtcgtgctttggtgcgtaattcaaagacggacaaggatggtgtgtcatccacatacatcggagcatcgtataattcttttattttataatccaattgtccccattcatacggagccaactggccgctcttgattttctcacccggaatttcgcacacgttgacaatcatacggttgactaactgtacgttggacatttcaagagagaacaaagccacagggattttcgcatttaccgccatgttctttgccatggaaagcacaaaagccgttttacccatagcggggcgggcggcaataatcaccaggtcggaattttgccagcccgaggtcattttgtccaatgcatggaaaccgctttccagaccactcagcccgtccgttcgtgccgccgctttttgaagcatctcatacgcttcctggatgacagggttgatttgcgtataatccttcttcatgttctgctgcgagatttcgaacagttttccttccgcttcctgcatcaggtcgtccacgtcttgggtttcgtcgaaagcctttgtctggatgttgctggtaaaggtaatcagttcgcgtgcaagaaacttctgcgcgatgatacgtgcgtgatattctatgtgtgcggaagaggctaccttgccgcttagctgtgttatgtaaaaaggaccgcctgcatcttccagttcaccggtgctgcgtaattgttcggccacagtcaagatatcgactggttgctggcgtaaagccaaagaggtaatagccgaataaataagttggtgacggcgttcataaaaagattcgggacgaagaatctcacttactaatgagtaagcatctttttctatcattaaggctcccaatacagcttcctccagctcaggtgcctggggctgtaaatgtccgtattcgtcaacaggctttgctttcgaagttttgggagtacgtgtcatttttctcgtttctgccattgtcgtctgtttaaagtagggcaaagatagaactttttgctgagttggacactcgtccattcccaaaaataataaaagaaatatgaacctgaatctacggagaaatgaacaatctggacagtaaatggtttttttatatggtaaaatgaaaagtttgttctatatttggcgctctgtccggataaaagatggcgtgcatctttgtagaacgggcaacaatctaacgaaacacactaaaaataactatttaaagaacagaatatgattacatttcctaatgcaaagattaatttgggacttaatattgtagaaaagcgcccggatggataccacaatctggaaaccatattttatccgataaacctgcaagacgctctggaagtgacgcggcgggaaaacaatgacaaagaatacactttacacataagcggatcttctttggagggtgaacccgaagataatctggtagtaaaagcctataagttattaaaaaaagactatcccggactgttgccggtagatatacacatgtacaagcatataccggcgggtgccggactaggtggcggatcatcagatgccgcttgtatgataaagcttctgaatgataaattttcattgggactcagtacggaacggatggaggaatatgcggtaaaactaggggcagactgttcttttttcattcggaacaaacctgttttcgctaccggaatagggaatctgttcgagcctgtggaattgtcattaaagggataccatataattttgattaaacctgatatctttgtgtccacccgggatgcgtttgccgaaataaagcctgtgcgtccggctgtttctttgaaagaaattgtaaagcaacctatggaaacatggaaaaacagtatgaagaatgattttgaagatagtgtcttcaaaaagttccctgagattgctgctataaaagatgaattgtatgatttgggggcagtgtatgccgccatgagtggctcggggtcttccgtctatggtattttcaaagcaccgatagagaatgtggaagataaattctgtggatgcttttgcagacagagagcgttggaatagtgtggcagatcagtggttagtgattagtggactgcgctgtcatgccgcaggtattaaccactaaccactatagtctatcttttacatagtgccttgaaatcacaataggtacatttttctatgatttctgtttgggtaaatgatttttccggattaaatatctcttctaataatccttgaagtcgttcacggtattctttttcatatttactgaaatcttccacagcctctttaggctttcgtggctcgcccatttgtataacgggagaataggtttctgtagcggcccgatgaatatagagaagggccggagctatcttcatcgttggttgcttgcggcacatgatggcggcatacaggaacgtctggaatacatagttggaacgtttcttgtccggaataaacagagattccacatggggtggggtgtctgcatcaccgcctgtcttgtagtccacaatacggagtgtgccatccttgctgtccatacggtcaataattcccccgatacgtgattttatgactcctttgggtgtttgtatgtcgatgggttcatccacttccatttccgatgcaataaaagtgaagggagcgtaacgtaaatcattttgtaaaagttgttttaaatatcttgcaataacggcagagttgataagttgtacgccgttatattccggtttctcgttttgcggaacattaaagaataatttcttgaatgctgtatccacataatcttgcagcttcacttcattgcgtagcaacgtttccaatgcttccttattaatgactttgccatgagtggtcaggtctttataaatatgttcggctgcataatggaaaatacttccgaatgtggcagaatctatttccgcactcacttcatcgggggcggagaggccggctacatacctataataaaattttaaaggacaatccaggtaataattcaaggctgatggagaaaattttgctttgggattggcacggacatcaaacaggctttgcatccggcgcatgacatccggggtcttttctacagtgataggcgaggtgccttggggggactgtccggcctccagaaactgacgtgtgatggggtgaggccattcaatcaggaattgcagcatgaaacggctccattcgccgcggttcagtccgtccgaactggtattgtacatcaaggtaatcctttctgcccgttgcagcagacgatagaaatagtatgcatatacggcaatcttatgctctatagtagtcattccgaaagctttgcgcaggttgtaaggaataaaggaagagtctcctcccgatttgggaagctgcccttcgttgaccgatagtaataccaagtggcggaaatccaggttacgtgtttccaatacccccatgacctgcataccaatggccggttcgccatggaatggaatattggtcgctgacaagaccttgaccagcaatcgccggaatgtttcgctctgtacggttaattcatcttcttctatcagtgtgcggaaccggttgatggtggtataggctttgaaaagcgactcccggtaaagttggttgaatgcatctgtgtcttcggtaccggaagtgtttgcctggtaaatgcctgccacttgctgcaaagtttcggacaggcgtatgcacagattcaggtttccggaaagcggagtgaaaagccgggtaaggaattcatctttacccaattcgccgggtaacggatagaaacggttgttccgggtcagttctttttccaacaattcggcttgaccggtgagttgccgggtataggggtgttttaacagtgtaacaaccgattgaaacgtgtagcggccgcttttgaaattaaatccgtgggtatgcaactccagtaaggcgatgaggaaactatatacaggagtttgcgataacggaaatcccatggtgatattgacatgttttacttctgccggcaatgaatggaggaccggctgaagcaatgcttcgttacacaatacgactgcggtttccttttccggtgtagtcagattgtttcgtatccattgaggcaggtaacgggcttgtgcattttcagtagaagatgcgatgtagtgtacctctttaggtttcgagagatttttgaataactcaccggacaaaggagaaggaaagtcgcgtaagttccggcggataaactctccggcttcatgggtgacggcttgtctgttttccttcatataaaattcgtcgtaatcccaataaaaaacagctttcccgacatctttcaattgggtgaacaacgtatgttctactttgttcagtacattaaatcctacaaaaacatatttctcgtatggaagtttgtccacatccagatgctctatgacgtggcggtacatcattccttcgtaggcaatgttttgagaagctaaggattcacggaaccctttgtagatgtttcccaatacgtcccataaagagataaaccgttctttcagcgctgttctccgttcgatggagaagttctggaagaactgccggatagcttcttcctgctcatcgtcaatgaaggtgtagtcgtccattatgttgcgcagatcctgtaaattggaaaacagtttgtcggtatccactttatttttgtcggcatcgtcaaaatcactgatcagcatttctccccaaaaatagaaatcatccagtgtttccgtactttgagtttcccgtcggaatattttataaagttcgcataccagttttaccggatcacccacttcccacggagaaaggctacggaacaattcgctgatgctgacgtatgcgggcgaccaaataggtgaatccgactcttgggcgagatactcattaaagaaaagtccggcacgtttgttaggaaaaaccacggctgtatgtgccaggtttccttccgtatgtttatataaatcggctgctaccagtttcaaaaagctttccattattctatttcctccagttcgttgttaaatacataccataaatagccacggatatgctcatatcccatatccgataataaatccatatattctttcacctgcttgttgtaagctttccgctttttaccgaatttaaagtccaccacaatcacctctccgtctttcatcatcacgcggtccggacggcgggtttgcagcactcctttttcccgataaataatggcacactcattgtatagttcccagcggcccgaataccattctttgaccagcggatgcttcaaagcccattcggtgagttttcgtatttgttcctcctgttgtgccgactctatgattccttcgaaacgcaggcgttctatggcgggaggcacatcgtccgtggtacggattacggagaacagattatgcaacaactgtccttgccggatgtatttgtcttccgtctcctcttctccccggataaattcggcagaacggttggactgtttgaattcgatgttggtttccagcgtttccagatggataggcaaacgtcgggctacagtcagcagcttgttgccggatacttgtttttcctcttcgtgagatgagagatagagcgttcccagttcgtatatttcttctccggtggcatagctctttccggtcatgtcggataaggcacttcccaacaattcggataccgttcctttctgttccgcctttccatatataatcaagttctttttggcacgggtaaatgccacataaagcaggttcagattatccacccataattgcaagcgttcattcaggaactcttcccgataaatggattgctgcatggctgtggaatagttgatgggaacaatgtcaagatcgctaaacggagcttgccggggagcacaccataccagatgattgtaagtctcattctccattttccagtcgcagaagggtagcagtacggtatggtattccaatcctttggacttgtggatggagagaatgcgaattccttccacctcgccggaagggatggtcttgctgcctagtttttcttcccagtaggtgataaaagcggataattcggaagaattgctttgcagatattccgtcacggcatcaaagaaggcgcacagataggcatcctgttgttcgatgcaggacatctggaacagattgaaaagtttttccatcagctcatacagtggcatgaggcgaagctgctccgcttcttttatgaaatcgaatggcagataatcatctatttcgttcagcaatagagtgttgaggtctattcctttatgtaatacttcattctgataggcagcagccagttgtgccttggcaatccggttttcgggttgtgacaagtagcgcaggccatccattatcatacataccgccagtgaggcatccagtcggaatgcctcatcggatacgattttgtaagaggtgttcttgtcgaagtaatcggctattaaaggaatgcttctgttcttgcgcaccaggatggcaatatctttcagttgcacgccctgtgccacaagcagctccacttcttctcctaggtggtgcagggtgttttccatataggtcatgtcttccgtatccgatagaaattccactttgacatacccttttccgggatctttgtatgtttcctgacacacgtcgttgtaggcttccttcagttccttgcattcctttttttgttcttccttgtaaatgttgttcaacacctcgcaggcggctgtaaacacttcgttgttgaagtgaatgatgtttgcggcactccggcgattggtggtcagtgtctttactttgacgggaaaggcttcgatgtttgttttcaatccgttcagtatgccccagtcaccgtttctccagcggtagatggattgtttcacgtctcctacaatcaagctgtctgctccttgggacagtccttcgagcagcaacagacggaaattgtcccattgcatacgcgaagtgtcctgaaattcatcgatcattacgttgcgtatggttgttcctatcttttcgaatacaaacgaggaatctccttcttttaccaggttatgaagcaacgcgttggtatccgacagcaggaagcggttgttttcatggttcaattcgcgtacctcttcgtctatattggccagcagacggatattgtttacgtggcgcagggagagttggcaggaattggccagcatattgttccggcttctgtatttttccgattcattcagcagaggaatcagttctttttctgccagacctaggatagcgttgcgtatgggggaggtttttttcacccattcgtcggggcagtccagacatttttccactgttacattgcggacactgtcatccagtttacccgattgtaatttattaaaatagctggctatacctcgggagccgtttttcaaatcttctactttcaccccgtttgtatccaatattccgaagaattggtcggcaaatcctttcatttgttcctgcacctcttccaaaatggcttgcagcgtttcgcggtaattcttgatacagtctttgtcccgtaatttttcccgtagtccgtttcctttttctatatatccttcatcgaagatatttcgtccgaaattctttatctcaccggaaacattccacctcttgtcatcggctattctttcttctatgtattccaacagccaatagagtacgggagattgtcggtccagcttttctatcatggagtccacggcatcactcagaacttccatattgttcagttcgatattcagattggcacccaattccagctcccgtgccaaattgcgcatcaccgactggaagaatgagtcaatggtttccacccggaagcggctgtaatcgtgtatcatgtagtgcagtgccgtaccggcggctgtccttatgtcttcttggggcatttccagttcttctgtgattttctgtaaatagggatcagaatccttatcctttatccatattccgtatagctgactcagaatccgctctttcatttcggtagtggccttgttggtaaaagtcacagccagtatattacggtatgcccgtgggttctgtatcagcaactttatatattccacggccagtgtgaatgtttttcccgaaccggcagaggctttataaactaataattcaggagaatgtttcattttaaataatttgctaatttgctaatggctgcgctgtgtaccggatggtaattggctgacacattagtacatttttatttttaattaaaaaccagcacaaaaacagtggcctgtcccttttccttgtaaggcagcagggtcagtgtgccaccgctcagtctcatgatttgtttgctcaggctcagtccgatgccgcttccttcctctttggtcgtgaagaaaggtacaaaaatttgtccggctgcatcgggaggaatggcgggaccgttgttggctatctctatacggatactttcttgcggatcacaataagctttcaaggtgatctttccgtcgggagcattacctatggcttgaatcgcatttttcagcagattcgtaaccacttgggctatcaggttctcgtcggcaaagactatcaggtcttcccgggcttcgaggatggaaagggtgatgttggggcatggatgctggtgctgtgccagtcggatcatccgttccaggaaaggacggacatagaacagcgatggctcaggtgatggcagtcgtgtcagtttgcgataagacatgacaaaatttatcaatcctttacctgtagagtgaatcgtttccagcccttgtttcatttcttcattttctgctccgggaagagccagcagcgtttcgctgagggaagtcaccggggtcagggaattcataatttcgtgtgtcagcacgcgggtaaggcgtatccatgaatctatttcccgttcatccaattcccgattgatatcactcaaggcaataatgcggagttcctcgtctttgatacggatgccggacacccgtaaggcaagatgtaccgttccccgttccgtattgaactgaatttgcagcttgtcacccggaactgctttttccaaagcagtcatcagttcgtccgagatgcgggagagttgtttgacatgagtcagaacatccagccccaacagattcatggcctctttgttcttttgataaacggagcctttgctgttcagtaccactatgccggtttctacaaagtccatgatgagttcataatacttctcgcgttgtgccgtttcctgttttacattgtacaaaatacgtgcgatacggttcagcatgacattgaccatggaagaatcgccaggggaggcatgttcgtaaaaacgaacagcggggtcatcgttttcgatggcgtcgagcagaaaggctatcttccgggtattaaaagtgtacaggcggtaaaaccagcctatggaaacgaggaatgaaggtacgattacgcatagccacaaccagttgcgctgctgaatcagcagggtgcaggcaatggctagaaccagtacggtaaataggcggaagaagaattgtttcacagcttaattatttattatttcgtttgaatgttcctttagttcctgtttaaaaatagattattgttatttgttttgtcatcctgaaccatcgtgaagaatgagatgagataataggtcataatccgaattttttcatcttattataaagcgtctgccgggtaattcccaactgtgccgctacagccgagaggtttccgttgcatttctctatcgctttctgaatcatttgcaattccatctcctccagagttgagacacttgtttctgtcgcaggagccgctatttttcggggaaaatgaaaatgttcctcactcaatataccgtcttcattgataatgaccgctttctctacggcatgttccagttcgcgtatgtttccataccacggatatgtccgtaacttttcttgcgcaccggtagaaagaaggatatttcctttgtcatattgtttgcagaaccggtctataaagcgttcggccaaagggataatatcttctttgcgttcccgcagagggggaatctcgatgtggatggtattgatgcggtaaagcaaatcttcgcggaatttgcctttggccaccatctcttccaaatcacaattggtggcgcaaatcaaacgtatgttgacaggtatcggttcgttgcttcctactcgcaccacgctccggctctgaatggcggtgagtagtttggattgcaggtgatagggcaggttgcctatttcgtccagaaacaaagtcccttcatgggcggcttcaaatttaccagcacggtcggtatgggcatcggtaaacgagccttttttatggccgaacagttcgctttcgaacagggattcggtgatggcacccatgtccaccgttatcatatcccgccggtatcggttggacaaggcgtgtatttcccgcgccagcatttcttttcctgtgccgttctctcctgtaatcagaatattggcatccgtttgcgccactttctctatcagcgtccgcagttgcttcatggcattgctttctccccaatacatagaagatacggttttagggatttccgctctcttcttgttcttggaggaattgcggcaggcagacagcaaggtttctatcagccgggcattgtcccaaggcttgacgatgaagtctgttgctccttccttgatgccgcgcactgccaggtctatgtcagcataggctgtgaaaagtactacgggcagggaggggtgtattttctttatctcgtgtaaccagtacagaccttcattcccggtattcagtccgctgctgaaattcatatccagtagcaccacttgcgcattttcttcacgtaacgcagcgggcagtgtgatgggtgagggcagtgtgacgatatgttcgaaatgatttttcagcaatagctttactgccgacagcactcctttgttatcatctaccacaatgatggttccttgtttgctcataagtcgttgtagcttctttttcctttaaagatatctttagttgtgcgtttcatgcaaaggtactatctcttcacacactctcatttccattcctttatagaccactactattttgtgtagctgtgtggtgcccacagcattcttcacccggtaggaatcagcataacgatttgcctgagcgatcccttccagcctcagttcttccacacggctctcagagtctttgtatttggcatatttcaactctatgatataactgtgcttcatatccggatagatttccagcaaaggacacaggaaaagatcagcgtatccttcttgtgtatccgcttcagaaatagggcggtagaagcggttttgcgctgtcatggccagtgtgaatccatgtacgaaaaactctcctttctgtttgtcacgttgtgaagcgtaacgtttcagacagtcggctatgtaaccgaagtaggcctgccagttaccatcgtatgccaaagccgaggccagttcgtctttctcataactgctgaaactaaggtcggcctcattgtatgtattcagcaaataggtgtatagttgctcttccactacctgattgggaatggtgagtttgttttttcctttatgcattccgctgatggtaagcataccgaaataatagagcagacttatgaaattgtccggatcgacaatattcgcagccggaaagctatccttcagttctccggtgatatatccttgacttaccagggtttgtatgatggatgcatcatgagcaaactccttgtccttgcgaatcagcatccggagtttttcgtagtctatgcgtatgttgctttctatcattttctgtggcgctttgccgcgcagaatatagtttttgacaaaatagagaaccatgttggaattgtacagggtagtttctccgtagcattccggtgcgaagcagtagttgtcataccacggcttcatgatatctatcagttggccgacggtatggttgaaaggactgtttgtggaataatacgtcagcatctcacgcacttccttttccgtgaatcctgtcatttcgttgaactctggtgagagggagtaattggtacctatattgaatccgctggtgagatcatccatggttatggggcttactccggtaatgaagcaacgcttgatgcaggaatctgttccggctttcactttgttgaagaatgcgcgcaggtaaccctctttgtgtgtttcttcagtgtatcggtgcaggctttcggcatcggagagaatggcattggtaaagtggtcatactcatcgataaaaagataaattttctgctcagtcttgttgcactccgtaaacagatattccaattgttctatcgctcctgatttttcatccagcttctccttgataccttgtgggagatagtcggcatagatatcgcagaaatagtcgaacatggtctggcaatgtgcgtccatcccttgacggtagttgtgcaattccccgctgataccggaaaaattgagtttcagcaccagataggtgttgcggtccggcgtggggtgctttcctatgtagaggtctccgaacagggcgtcaaacttatcgcgggtgcgtacatcataataatgttgcagcatgctcaaggtcagacttttgccaaatcgccggggacggatgaagaagaaaaaccggtccgactgttctatcagtgggatgaaggcggttttgtccacataataataattgtcgaaacggatgtctgcaaagttcatcataccgtatggcaatcgtttcctgtttgaaggtgcatattccattagttatattatttttttatgaataaactctggtaaaagagatatgtatagcatacaaagatactttcttttccctgcttctccaaaaaacaaaggttctttctttttggtaacatggaggaagctgtccgataggtatccgccaatcttttctttcagagaaaacttttcaatttcatgaattgttctattataaaatagcatttcaaatgaaaacatttatattaagcataattgtaaccatgattacatcggtagctggtgcacagcaaaaaagtttttatgactttacggtcaagactattgacgggaaggacttgccactttccacattcaagggtaagaaagtattggtagtcaatgtggcatctaaatgcggtttcactccccagtacgccaagttggaggagttgtatgagaaatatggaaaagatgattttgtcgttatcggatttcctgccaataatttcctgcatcaggaacccggaacgaatgaagaaatcaaggagttttgtacgttgaattatggagtgacttttcctatgatggctaaaatatctgtaaagggaaaagatatagctcccctctatcaatggcttacgcataaaagtgaaaacggggtttcggatgctaagatagggtggaactttcataagtttctgattgatgaaaatggtagatgggttgcctcaatcggctctactaccagtccgctttcacaggaaattgtaggatggattgaagaataaaatgaccagaagataaataatgccctattgttattgcaccagctttccgtttttcagttccgacatcagcaggtcatagacgtatgccgggctttcgatatacaggccggtggagaagtcttccagtttgacgaatgtctccgaattgtggaatgtggagatggcttcctgcaaatccatatcattacgttccaccaagtaacggactacatcggcggatattccttcaaagaggaattttgcggtattcgtgttcatagtcgtttcagcattttaatcgctgcctctgagtgaaagaaatattgtgaagtcactttcgaaaatgtcagttcgtgcaatagttgttcttcgttaataaaattctcggtgtataaacgtagcaagcgcgcaatggtatcatcggcaacagggccaattacgatatcgtaatcgtggcaaggctgagtagtgtttatatcgcggttcgacatgacaaaacgtgcccattcccagtctggctccttgaaaaccttgactttcaattcgctcgactgcgcttcttcgaggtcaaactcaaacatagtcagagtggggtttccgctgaacatccgcgctgttcttgcggccatcctttgggcctgttccctaatgtcggtcaggtaaaatcctctgccgaaatccttataggggcggcatctgttgaggtcgatgccgtcgattgccatatttgaaccgtggtaaagtatcatcgcaatgttcctccattgttttggcagacgatggtcaggtcatccacacagtcgttaaaagaaagcgtgtgttccacatcgtaaaattcggtgagaaaatcaatgcctttgaaacgtctgatataattgcttgcctcccggattgtcaaatcgtgacggcgcgcaaattcgacaatgaccgtcatcacataatcgattaggttcttgtccgctttctttttggacttgagcgccactatcggttcgacacccaacgcctccgctatgcggttgacagtgccaaaattaacacacagaccgttttccactttggaaaccattgctttttggacgccaatcatcaccccgacttcttcttgtgtcaatcctttgttttttcggcattgggccaaaagttctcctattttttgcaaattcgtattcataccacaaaaatagataaagtttcttgtgtaggaaactttttaactacaaatatattctttagataattattatctttccaattaaatggcagctctgctctgacacgcaagaacccgtgtgccggatgatgattgttaggaaaacaggagggaaatcagttcctttgtacatcataggttatggaacggtggttcgaaaagagttgtcgctatttttttgcttatttatttgtggggataaatatttatctctatattgtattagtaaaattaaaaatatcatggagaatgattattaaaactgaaagttatggatacaataaaagacatttggtttgatgctaaccgcatttatatgaaaacggatggtggagaaactttcagccgtcccttagaggcattccctttgctgaaggatgcaagtgacagagagcgccttgatttcaagataggaaagtttggtgacgatgttcgttgggaatcattggatgaggatattcatatatccagttttttcgatacagcggagccggattatgaaaatgagatagcaatgatatttaaacgtttccctcaactaaatgtgtcagaggttgcacgtagtatgggaataaacaagagtcttctttccaagtatatctatggtattaaaaagccgagtgatataaggaagatgcagattaaagaggctctccatcttttgggaaaagaattacttgccgtttgattaatctcttaataatagtttaggtgtgattccatttggtttcacgccttttttatgttaatttttccacaatcatagtttcaacagaaagataattaaatataaggaagatatggctagaataaacaaatacggctatgttgctgcgtgacgtttttgcatccgtcagggagatgcggtgaacaagccaaattcataccaagaaccgggcaagcatatgatgcaggcagggtaggcatgtaccgagtaccaggtagccttgtttgctgtatcttatatcttaccatctgggcgatgatgcgtccggaagaatttgtatcaaggtaagtataccgataatctgtttcttgtttgttttttgagtaatcaagaaacatcactaaaaatagcggaatatattttcgtcctatttattaaattgctatctttgccacgttttccacgccggtacttccgcaaggaagttagggaggtgggaaatatacatatatagaaaagacgtttacttgacgttttgttcttggctctacagaacttcgcaaattctaaaatccagccaaaacaaagcaacagtaggtgtctgcggggtatgtttatatccttggtgcgcctttgccggtcaaaggtgcattcaagtgtcattatacatatcggcgtgggcttctgcgttgctcgttcagacagcaatgggcagtgcaaagccttcgaagtgtgggacgagtaacaggtacagattcccgcgctttttttatatataggtattacaaatttctgatttaacatatatgaaccgtccggttcgggaatctgcggaaggttatcggttgacccgacaggctgcatctacatcgtgcggatttccatcctccatttgttgaaatagcttttccagtcaacttaatcacaagaggccgattcctcttgtattttacgaaacttctcgtaattgattgaattgcagatagatatctgtgcttcaaagctccataactatgctttcaagtgaaaaaatgcaatggtttgccatgcgtgccacttatcgccgggggatgcagatcaaggctttgttggataaagaaggaatcaacaatttcattcccatgcgttacgaagttcgtataaggaacgggcgcaagaggcgtgagctggttcccgttatcagtgatctgatatttgttcattccgtccagtccgaacttcagaaggtgaagttcaaacttccgtattttcaatatatgattgatatccgcaacgggcagaaaatcattgtgcccgatgatcagatgaggcagtttatcgctgtggctggaacgtatgacgagcatcttatctttttcagtcccgacgaggtgaacttacggcgcggtacgaaagtccgcatcacaggtggtgatttcgagggctacgagggggtatttgtaaaggtaaaaggtgctagagaccgtcgtgtggttatcagtctgcaaggggtgatagccatggccatggcgacgctttcgccggacttgatagaagtgatagaagagccgaagaagaaataacttcatttgctacgttaaacattgttattccctgattaacgggaaagtgaacgatctgataatataaatcttatatataaatgtgtagaaccacatccatgccgtcaggcatccggctccagcagttgattcagaatcggtataaggaaattttagccagggaaaagaataatgataaattcattcatctgtatgacattggcgcgtattgggtggctttcgagcgttccgcctgtaggttgagcggtttgttttctaaaagtgagctgactttgtttcgtgtcccggattgtgtggaatatgtggtgatggtttctgttcctgccgatgaggcggagggctgtttgggtgagtacattattttgcacgatggaatttaccggaaagtgtggtcggagcatgttttgccgatgggggattatcgtcattggcatgagatggctgtgaggtctgttttgttgtaaagaaaagtatgcggacttcgtggaccaagtaagtggtgttactttgcttacgaagatatcttacttttttcaatggaatatggtcatccgtcatgctctatagggaataccctgaaaaatccttcaaaagcttcagcctgctcgcaaacgccctacccgtgggcattccggctgaaggattgggctcaggaatccttcagctgggggttggaatgtttcagccgaactgatcttcctccgattcttagggaatcgtttttcctgaaggatattttccggctgaaacatttcacaatacatatccttcagccggaatgccgacaggcagggtgtttgcggagtggctgaaagatctgaaggaaaaaaaaggcgtttcggcatgtagataccgttatgaaaaaaacaacaggtcaaatttttaaaagctcttgttctttcaatgaaaacgtcctgttcttttttttaaagaccttgttcttttcggaaaagaacaggatcttttaagggttagtaacgtgtatgccggaaggttggtaacgtgccaccccacacgttactaatgtgtggggtgtaagattagtaatgttgcaggtggaagattgcatatcttgctagtgatacaatcataaacgtatgaagttccagtatataaaagataaagttagtgcttatttcactaaggggaatgagcgtagtgttgcggtgaagaaaaatatcgccgtttcattagtgttgaaatgtataagtattttagtttccttgcaggtcgttccattgaccatcggttatgttaatcctacgaagtatggcatttggctgacgttgagttccattattgcctggctgtcttattttgatttggggtttgcccacggatttcgtaatcgttttgctgaggcaaaagcaaaaggggatatgaagttggcaaaagaatatgtcagtactacatatgcagtgctcttcttgctcttttccgtaattttattgataaccttggtggtgaataattatttggattggagtcgtattttaaatattgatcctgtttataaggatgagctgagtctggttttcggtttgttggcatgcttcttttgcctgaacattgtggcaagtgtctttactaccatgctgacggcagatcaaaagcctgctttagcttcgcttataagtacaagtggtcaggtactggcttttgcttgtgtctatgtattgactaaaaccacaaagggaagtctgagtgctttggctgtttctttttcagctataccgtgcctgtttcttttaattgtttctattattgtgtatcaaactaaaaaatacaagattgtagccccttcgttgcgtgacgttcgcttttcgttggtgcggagtgttgttggtctgggtggacagttttttgttgttatgttttctatgctttttatttttcaacttactaatatcattttgtcaagagtgcaaggcccagaagcagttacgcaatataatattgcttataagtattttaatgtacttaacatggctgcaaatattattttgactccgttttggtcagcatttactgatgcttatattaagagagattataattggatgcgtggtacgctagaaaaactggagaaattatggttgttatgtattcctattttagttttaatggtactgagttctgatctcttatataaattttggattggtgattctgtagctgtatctttttcattatcattttgtatggcaatatatgtattatgtcagacgggaggaaatatgtatatgtttcttattaatggaacgagcaaaatacgtttgcaactaatcatttatttgtcatttgctttggtttctattccgttgatgaagtattgttgtaagtattatggtatagaaggtatactgatagttcctactacggtatttattttgcaggcctttattggaagagtgcagatattgaagatgataaatggtacggctaaaggaatttggctgaagtgaaatgaaaaacaatatgaattatcccctaatttctgtcataactgtttcttataatgcagttttaacaattgaacaaaccattctttccgtcattaaccaaacttatctgaatattgagtatatcatcattgacggtggaagtacggatggaacggttaatgtaataaaaaagtatgcggataaaatcgcttattgggtgagtgagtcggataagggaatttatgatgcgatgaataaaggaattgcttattcgcatggagaatattgtaattttatcaatgcaggtgataaattttgttcctcatctatattgaaacaggtcatggactttaatcatgtggcagatataatagttggtcaggatttacatgttaatgaacataataaaatagtatcacgcagtgtattacctcgaagatataatcttctgcatttttatataactaccatacctcatcaaagttgctttataagggcctctttattaaaaaagtattattatgatacatctttaaaaatagtatcagactggaaattctatttacaatcaatcgttttaggtgggcatagtgtggctgcgtataacaatgttattgtgatatgtaatcccagaggagccagcagtgataacaaccggataaaagaagaacgcgaaaaagtgcttaaagatctactcccagcttatattgtcaatgattatcagtgtttatcctgtttgggagaagaatttattgaaaacgctctttttttatttaataatcattggataagatttttagtaaaaaaggggcttgcaataatggttaaaatagtaagaatatttaaatagtttatttatgaaaatagtagtgttcaaaggaggactgggtaatcaactctttcagtatgcattttataaatacctttcaagaaaggatgaaaccttttatttctacaatgatgcttggtataatgtgagccataatggatttgaattagataaatattttaaaactgatgatttgaaaaaatgtagtaggttttggataattctgtttaaaaccattttatcaaaattataccattggaaaatatatgtagtaggttctgtagagtatcaatatcctaatcatttgtttcaagctggatattttttagacaaaaatcggcataaggcgcaaagaaaagcaaagttctacataaataaatgcaggtcagcatcttgtatgcagggcgagttgaagcaggcttcggcataaaatgcctgaaaacacccctttcggacaaagttcggctactaaacagctaccggttccgaaacgaggtatatgcggcataacgagttctgtttcatcgctttgccttgttttgcatagctcttggtaagaaataagtaactacctttagaaacgaaaattttagagttatggaaacaaagagaagtacgtttgcgacctcgttctacatcaagagatccgcagtgagaacccgggacggtaaagcccctatcatggtgaaaatctccgttgacggagatgacaaggcggtgggaaccaagctgttcgtcactcccgacctctgggagaacggcaaggcgaaaggcaagtccgccgaggcaaacgagataaacgggcaactgaaggaggtctccgcccggctcaccaaccactaccaccgcatcctccgggaagaggatttcgttaccgccgagaagctgcgcaacgccttcctcggtgtcggcgtgatggagaactgcatcctcaaagacttcgggaacatgaaccgggagttcggggcgatggtcgagaaagggcagcgagccaagtccacctacaacaagtatctggctgtttacaaccatttcaagaccttcctttgggagaagaagaagcgcaccgacatggcttacaaggagctgaccaaggagatcatcaccgatttcgacaagtacctgcgggtggagaaagggctgagtgccaacaccctctggatatacaccatgcccctgctcagcctgaccgacaaggcgtggcggcgtggaatcgtccgcaccgaccccttcagcgagtacagccttgaaatgcaggagaccgaccgtggctaccttacggaagaggagctgcgcaccttggctaacgccgtgttcgtcaagaaacagaccaacctcgtgcgggacatgttcctcttcgggtgtttcaccgggcttagctacattgatataaagacgctcacccatgacaagatacagcgcatggacttcgacggcgaggaatggatcatcacccggcgcaccaagacccgtgtatcgagcaacgttcccctcatggagattgccaaggagctgatagagaggtacagggggcttgccgggggcgaccttgtctttcccatgcccagtaacagcgtgtgcaacacccacctcaaacagatagccaaagcctgcggcatccacaaggagatcggcttccacctgagccgccacaccttcgccacgaccgtctatctctgcaacggcggcaccatcgaggcgctctccaagatactcgggcacaagcacatttccaccacccagatctacgccgaagtgaccaacaggatggtaagctccgatttccgggcgatctccggcaacctcgccgccatgcagcggagcgtgctggagaagaaggacaggaaacaggacgggaagcgggtgcgccgctccctccgggaaacggcttgacgcctttccccggtgcagaatgcggcaaaggcaggaacttccgatgcggtgtccctgcctttgctgcatttcccgatgcacacccccgtgcgtttatgttggacttttcccccgtttgcgctttgggcgcatgtccacgtagttctcctccagcatacgcagcagatccgactggcggtaaagcgtcttgcccggcagcgatatgtacgggaccagccgttgcgtgcggtagtcctgcaacgttctcggcgtgatgtgcagcagcctgcacacgtcctcgcccgtgagatagacctcgccgttcatcgccgggcggaagtgcgccgttaccgtgtcgaggtacctcatgccttcctccagtgcctcgaagtatgcccgtacctcttccgtgtcccttgtgatcacttccatctcactcgtcctccgtcatttcccggctcatggcttccacgaacgcctccacgtcctccgtccggtagtaaatcttgtggttgatctggctgtacggcagcagcccccggtcacggtaggtctgcaatgtccgcttgctgatgcctaatttctcgcacacgtccgccccgtccatccagttcatcttttcgggcgggcggtagcgggcgcaaagttccctcacgtgctgcgaaaagcagccgaaccgttccttcatctcctcgaaggtctttctctcgatgcttactatttccattgtcccgatacgtttttattgttatacttccctgcaaatataccggtctgtatatgtccgtgtatcaaaaccgtaccgcttgtcctcgttttgcttcacgtttgtagccttgtcacgttccgggcggtgaaaagcagggagaagctctacatatccgcacgcccttccgcatattttccgccctttccgcttgccgtgtgccggacatttcgcatatttgtaaccgaccaaacatcatcactatggacgaggctgtctttatcgctcaatacaccttccttgccactcctgcggtcatcgaggaggagagccgcatcttgggcaagatcgcacgccgcctgcgctgcgagtacgtcatccgtttcgaggacgacggcaagttctatttccttttggagacccgttccggctacgaggagcatttcgcccggtgcggctggtacatcgtcagccagaccgacttcaacagccgcctgaccatcggcatgggcttgtacgagagcgggaacttggcgggcttcatgtacaggctcgattccggcagcgaggacgaggcacgtttctggaacaatatccttgtattcactttcttcaatgacttccgcaaggcgttctttccgctcgacaaccgctttcagggtttcttccgcttggacggcagcttgtgtttgtacctttatgactattgccccgtccggcggaacgacaagatcaccttcgaggggaagaaggtgtcgaacgccgtctggcgtttcaagagcggcgagcagaccgaccttttcgtcaagctcttctcaatcgccgccagtcgcatccgggcgattcaggagaacaggcaccgtgccgtgctgattcccgtcccggcatccacacgggagaaacaccgcacccggtacgaggcgttctgccgcaagctctcggcggacatgggagttgccgacgggtacggggcgataaccgtcgcttatgaccgggcgcaatacaagggcacgcacggaaacggagaccgcaccgccaatctggagttccatcccgaacggttcaggggaaagtgcgtcttgctcgtggacgacgtgcttactaccggagctactttcatagcgctgcggcgcaagctgatagcgcatggggcaaagttcgtcatcggcatattccttgccaagaccatcgctttcgaggacgagcggaaggaataaggcgagaaagctctcatgcgttcatcatttcaggttatcgtgaatggtctaacttgatgtaccagccttccttgacgggcttgtacagcgtggtgtcgttgtatgtccttcggtaaatctcgttcaggtcgccgtgttcggtgatacggattttccggcggcttctcaatccgggatcgtaaacgaaactcttggatgttcctgcgtccacgatgccgtgggaatagtacggcataacgaggctcacatataccgaatccgccgtttcccattccctgcggtcaacaaggacaagaccgcatccaatctctgacaacaaggaatcgagctggagtcggtctggcttcagcagcccatataccggaaggtcttgttcgtcattcgtttcatgggatgtatcgctttgctctgttggatcaagtataatgacctcttccggagaaagcggcggatagtggaaactgccttctgaactctctgacatgatttcgtacaccttgcggaacgccgtctcgtgcgtggcgaagtggcgtatcatttcctcgtcgctcggcggcatgggcggctctccgcaacttgcggcaaacaggcttgctaaaagcaggattgtgatgggtattttcatttttgctcccaatatttttcaaattactgatatatatctgacagcaatgcctttgagttcttctacactgacttttcggcatgcttccaaattcaatctctctaaattatacaaatttgcgattgttggttttaggtttgtgagagccgtacacctttgtagaaaaagagtttttagattgacacacttttccaaaccttcgatcgaagtaaatgaacctccgataatacgcaaatactgtaaactaatggtcttttctaaaaatgaaaggttgtctgtcctaactttacttagctgaagccaatttaattgatgcagcatttcccaaccactgatttttgcatcataactgatattgactttctctaatactggaaaaagagataaatccaagtcaaaattattatctactccccaacggaaatctttcagttttgaaagatgatataatccagtaatgttcgaccttttagaaagagaaacgatccaatgaaatgtttgtataaaatcccgcctatttagaaaatcaaagtttacaactctttttatatcattcttttcagagcggacttaaacatctttgatattatgtctttgggcataatcaagaccttcttctaaagaatcaaaatctatcgttatgcctttaaaataagaaaactcactataatctactttgtatttttccataaatgcaattcttttcaaaaataggtagtgatttgctttttcgctgtaatcttcgcttcaagccttgatatgcagctattttttccgttcaattacaaatatatatcataaggacgaaacttcggaatattcggtcttccttttttcaaggtatgcttaaaagcagtttttgcggatggttgtttgggcgttccccttcgggtcaggctttccattgcaagtcctcgctatgctgtggacttttccctgcaatccctaacgtgggtgaaagggatttcactgtcttgcgttgacaccttggcgcacgggacgaagttcatcatcggcatatcccttgccagaccattgctttcgaggatgaacgggaatagctatttcacttttgcggtaatttcatctatcaggttcgtaattttcttaatggaatacttttctatcaatcttctatttgccgcttctgtctttaatttctcattgattaattttagttggggcagatccgattggcagcattcgttcaagttttctatttcagtgccataggaggtatatttataacgagactgcaaaaaatgcagaaaggtgttgcgtgattcgttagacaatcccaaaatactttttgaaaccttgtccgcatcagcctcttggaatattgaagtatccctataaagacgctgtttgaccgggattgcatcattcaatgccagattcaggcgttcgcaagtttcatccgtcagattttccagcatggcagacactttattaggacatttctcaaatctttgctcgaatagtttttgaaaatacgcaaccagtacattcaaaattcgatctgaaccaatattagaatgattccttcttgtacccgcatgtacctttgagttacagctcaacaaaccctccatatcgctgataccttccatcagcctgtctatggagtgcttgccttgggcaatgatgtcttcctcggatacgtgaacaaggttgtcgctatataaaaccgatagtatagatataatgacaaacaattcttttagatcaacgcttttatccgcaaagtaataccgtaccgtttcctcgtaatgtttctcgtattcttcgttatccagtctccaataatcatacagatagtcccaactattcaaacttacgtcttcggcagcaaagtattgctgcaaataggttgtgtcaaaatacccactttccagatagcagacaatttcattgacgataaaatcactgaaaatatccaaccgcttacctatctctataaaacggtatttggagaggattttttcacgctcctcatttttctctttatccgggaacatattgtacaggctgttgaacaggctcgcaatttcggtatttccacccttatactcgcagtaaacggcgacaaaatttgccaatagtgatgttatgataagtttgtatttgggagattcatgataatgttccggcaaagccatgattatcctgtggtaatcgttcagacattgccgaaggactcttaaattatcgaatttagaggcttggaatatcttgatgataagctctttgttttcagacaataggtttctgttgttggcggatatttcgccaatgaaaaaatcaagtgtctcttctatattcactttgatctcgaaagtgcgcccgatggtcttttccttgaaatccttgaatttcaacttgcacttatcgtcctctttttcggaaatcttgttctcatcgccaatgatgatgaccttgcatttacaatgttccgaaaagtaattgatgtatcccaacaaggtttccagttttacatcacatctttcaaggtcgtcaaaaatcagaatcttgtttccttttatttcggaattttcttctttcaacaacaaaatggagtccaagtcacaggttacacttccttcatccttgccatcaccgtcaatgtcgtatttcaaagcgattttcgaggcggcttttaatacattcttagctaatttcattcccttgctgtacagccacggggatatttccttgttgatttgttctgtgatttgctgggtagtggtcaaaccgtataaagacacataaatgggctgccattttaacttgtccgcctctctgttgcttttcagttgctccatccattggcggatgaaaaacgttttgccgcatccccaagcgcctcgcaacatgatggcatattgcggatcgggtatttccgcatattcatttaaaaaggtgagtatgtttctattcataaccatgttcattagaggtgtagatactaattgaaaagtgcgctgtattctaattgaaaagagctccatccataacttgttacaaaattactataagtttaaaatattcatttatcttgtctcattttttgtgtttccttaagcctataagacagtccggtcatattaaccagataagctttatgtgtaagcctgtcaaccattgccgccacaagcaccttgtcctttatgatttcattccatctgttaaaagccaaattagtagtaatgattgtagccttttttccggctcttaacgacaggtggttaaaaagcagttctcctccttccttgtcacaactgacatatccgaactcatcacagatgaccagatcgtatttttcaaaccttaattgtagcgtcctcagtgtctttgctgatttagcctcccttatctgggtaagcaggaccggcactgaagtaaacaatacggtaaagtcctgttggcaggcctttattcctaaagccgtagcaatatgcgtctttcccgttcccggatttccatacaggaccaggtttcttccctgtctgatgaagtccagtgtctccaattcaggtaatattacctgtgcctctttgggcatgtcttccataacaagctcatgcagatacttcatttgtggaaatcccgcagatcttatccttgatcttcttctacactcccttctcctggcgctttcctttccaagcaattccgtcaagaactgcagatggttccagttttcttcagctgccaatgaaagggtgcattccagttcctctttaaaggccagaagcttcagttctgcagcatagtcataaatggtttctttttctgatttcatatattataaacttaaatggttggtattatatcatgcacttcattgtatcctgtcatgagcgccgtgatgccttcaagcatatccacagcttctctttctatattctcctgttgtgccgggagaacaggcggttccatggtttcttctgtctctccctgtacgctaccatgcagcatggcctttacctggtccggagatatctttctgacaccacgtccggtcagctccttgcatgccgtgacaatgtccgttccggaaaatccattttttcgggcatagtccagcaacagaacaaacgtcctgttgtcctccttgaaatggatgtcatacagccttctcagttcttccggtgctctttgccaaaccacagagtggggcaatgcccccggtttacgggaaagtgtacgcaaatagtgctccagcttgatgcaccagtctccaccgcaataactgcgttgatgagaggccactttctccttcccgtgcaggatgacgattttttcactataaaccttgacatgtactttttctcccacaagagaatcaggtacggaataatgaacatttttcatgctgatagttgaccatttatccacaatgtactcatagacctcaaaacagcccagattaccgggaaaaggcttcagcgatgacaggtcagcttccagacgtgatgttttctccgctgttgaaagactgccttgctcgttgttgacctgcatacatacccggtttaaatgctcctgggcagaatgtatatcaccaaaatggtctgtcaggcagaaagctttccttctgacatattccacgctgcgctccacatgtcctttctcccatccggcccgtacattacagaaacggtactcaaaacaatagaaaccggacatcttcatcaaagcttctgtaggtttcttatcaccaccgacaaagctcttgacggctacacgcatattgtcatagaccatcatggcggggacaccatgtatatccctgaaaaagttacggtgggattccatgaaggcaagcgtattctgatgcctgaaaagataggcgtatctgccattgctatgcccgaaagtgaatacggccagataaaacttggttttgacgccgtcaataaaaagaagaacttcaccccagtcaaactcggcaatgcatccaggctcatagaacaaccggataaaggcttcgctctttttcttctctttgtatgactctatattttttatataactgcatactgtggcgtaactgatggtgtatccttgagataacagaaactggtggatatcctttttcaacatgcgctgtttgcgaagtccggtagctatcttaacggcattcttcttcaggcaaaatcctatcttatccttaatctcttgtgtgagccggcgaggacggcgtctggaactgtcatacctgggctggatggtaagcaaatcactcaaagcctcttctggattgtccgtgcggatggctgattcgtactttgaaagaatattgtcaacggtatgacggctgacatgaagttcacgagagatacgccgtttgctataaccgcatactctatacatgtgtattattgattgtctttctaccatagtcttcattttacctttgcatttggattatacaaaggtcattatacttatcctatggtggcgcaattttcaactggaatattggcgcacttttcaattagtatctacagtgaaatatttaatgttacgaaaaagtgatgcggcaaagttacgagttacaggtggctgatgtccagcatctcgcacacctccttgtgcgtcatccacttcgggtcggctttccgtcccttggcagcagggctttccgcttcctctttccgtttgcgctccgtttcctcccggttccgggattcctccacgtaggcagttatcttctcgatcttctccacgagcaggcggtaggcgttgctctcgatggtcattatttccattgtcgtactcttttttaggtttctgccgcaaatgtcgcccgattcgccggtttttcctgccaccataccggcaccttggcaaagatttttttctgatgcgcattatttcatcctcttttttcaccctcaccgcccttccgtccgtctttccgggcaacaaaaaggctgaaaaaggcaaggaaagagtagcgtcaacgtaaaaacaaggcggaaaggaactgacatcgaagcaaaaaagagcgtccgaaaggctcttttctgccctccggacgctctcttttcatctcctgccgcctctgccgttccgttgccaacttgctgccaacttgctgccaacttgctgccaacttgctgccaacttgctgccaacttgccgattacctgctgtccatgtcccgcatctttttgagcagcttctccttcatctcgtccaagaacgccgtcgggttctgctgtccccgcagcctgccgaaagcatggtacacgttgcccagatccacatggaaggtcttctcgaacagcacagccagctcgccgatctcggcgttgccgttgtccacgctcccggcggcatggatgccgtaaacaagctgtatggcggcgattttcgtgtccgtccagcggtgttccttccccggcacggcatccgtaccgtcccctcgtgccgcacgctctatccggcggctcagatagaccagcagcatctccaccgagatcaggcgtgccgccagtatgtcgtagcccgtggagaactccgcttcctcgtccagtacgaagctgccgctttcagggctgagttcgcccttcgcccgcaggaaatagtaatcgtcccggtatgtcgccccgctgtggtaatactggtagaagggcaggtagcgttccatcatccgctcggctcgttccatcgccctgcggtagtacgtttcggctacccgcaggcagccgggacagccgctctctatctgatatacccggtaatagtacagcagcctgcccgtcagggcgggcttgtagtatttgaagtaacggatttcctcctcgtccccgctgaacggacgggcgagcgcatacgctttcagctcacggttcttggctttcaggtacgaaaccatctcccggcaggtggcgaccgtttcctttccctccatgccggcggcagcggcagccatgcgccgctccgtctcctgcaacaatgtattgaaatattcttccatcatgattctgtctcgggttgtttataaggaagcaaagttagcggggtgccgggaaacggacgttctgaattttcaccgccgtgttcggattgtccgccaatcggctgcgggcagtcagcccctcacttctgaaccggaaaaggatgccggacgggacgggcgcaccgggcgatttcacggatttcggcaggagtagccttcaggtgcttcttgcagaagtcccacaggtagctcggagtggcgaagccgcacgtgtcggcaatctcttggaagggcatgtccgtgtccgccagcagggagaccacgtgcgccttccgctgttccgtcagccagcggtgcggagtcgtgttcagctcctccctgaaccgccgtcccagcgtattgaccgacatggcacattcccgtgccagctcctccacgtttttcaccttgggcagagccagtgcgacctcttcccggaaagagcagccccgcaggtgcggcaggtacttttccgcctcctgcaagtccgccttgccgaacatcggcggtaggcccttgcggtactcggactcccgttcacggcggaagcggaacagcagtcccgccagacggttgcagagcacgttcaggtgcgggtattcgtcgtaggcgttgatgcttgcctgcatccggcagaggaacaggaatcctccgcagtccttctcccggaaatacgcctccgccgtatccagcaggaagtccgccgagctgccgtgccggtggtaggcgaccagtatcagcaatccggcttcttcctgcacacgaaaggaaaggacggggcggtgttccctgagcagctccaccagccggaccatccgcccgtgatcccgtgcgagccgttccgccgcaatccatgttaccgggcgctccgcatccgtttgcggcaataccgtccgcacctttgccatccactcccgccatccctcccggatggcttcattcattagaatttgtgtaagattctctttcattctgtttcaattttaatgttaattacataaatcttacacgaaattacaaattgtctgcaacaagcacccttccggtgctttgcatcggttacggtatgtccttgcgctgcggattcggattttgctccataggttcggatattcggtcgtgaaaaacagaaaggctgtgccggttccacccccagaacggcgtgagacagtaagcaggggggagccggaagaaggtcattcgccggtcggtgagtatgtcttgccggttggtgagtgcgtcttttcaacgggatatttgccgtcccgtatctcctgcaacctttcgatcagcggttgctccttggaatggttcttttgttcggctatgatgaagaaggatgcgaagctaccggtaatatacagccagaacaggcattgaccgagcagtttccggtattcgcccattgtctcatacttcgcctgcatcgctttcagcttcgcaggacggtaatacagctttctggcaatccagataaaaggggcgagcatcgctgcggcaaacaggtaggcaaccgggttgaacctgctccattccaccttgtccgtcagggaagagaaccagcccgtcagcatatcccatccccatgcctcgaacaaaagatggagagccgtcaggttaagaaaccacaggattgccatcgtccacgtggcattggagataaccgccttgtctttccttgcacgtttgttcttgctccagaagtaatacatccagtatgccgcttccttgaacatagcttcctcctttccttgttttccgcttgcttatcccgttacggagaacagcaacagggcgcatcccgttgcggcggcaacgatcagccccagccagaaacggtaactcctttcacccagcgtacccagccagaaattcccctcccaacttcccggacgggagtatgtccaccgccatccgcagacaatccccacaagccacagcagcaggattcccgccacgatcaggtagccgtacctcggatgcgcctgcaaccactccggcagcccctccataaactcgcttatcttatcgaaccattccataacaataacagaaaaagccaaattcataccttacggacgaaccgttatacatcaaagcaaaaatagtgaaaagtccaatcactcaaaaagtttcaccgcaaaaatctttcccgtgtggaagaaaatcattttatttgcatctatatagccgcaaacgtatgaagaaagcctccccacataaaagaaccggtcggccgaagctccccggattcttcgaccacttcttttattggatgtggcgcagttgtcggcacggcttccctgaccgtagttttgtggtcatcagcgtagtccagttcgcctgccttctgtttccggtcgccgttgttttacagttcttggactctccgtctgtccgctttctctacgagacagacaaccgccttacccttttcccgctgatactaccgttccccatactgctttggaggaatatgcgcatctataccgaagagcgttaccgcatgatgcacgacttttacggggcgttccatgtatcggtgcggcaacgctatcgcctccgtttccttgtctgcacggtgcttgcagtccttgccatcctgcttgaaatatggctgttcaccctttatcatgaccgttgcacggccatatcctcaggcaacagccatcccgcaagcctttatgtcccatacaggtatgacaatggcaacgattccgtgcaggaaggcgtttaccgcatcgtcgatgaaaaagggcgtatcggatatgcggacgagcatggcaataccctcatagagccacgcttcgcttttggctttcctttcgagaacgggaaggcgaaagtaaccgacacgggagaacagaaagaagttcccgattcggatggggaataccactattgggaaagcgatgattggtattacatcgaccggaaagggcaaaggattgaataaaagccccaagactgccctaaatccgacattccagccaacccacttgccaaacccttgcagggcaagcacgaagccgccaagccctatcggaacaccccgttcatcccacctttcccccgaaacaaacatcaaaattcaaaacctattcatttacaacaacttaaaaggttttcggggcaagccgcaaaacagctctgtgtggctggtgcaaggtgcagctatatttatatatatagctgcaccttgcaccacagaaatgcacactgaaaatcaatactttacacttcttgtaaaaccacgggtgcaacctcgtttcttgcaccgcctcctgcttttatgcttttcctgtaatccggtgattccgaaaaataaaaaatcccccgaaacatttccctttttcggtcaaaatccctatatttgcatcagttccaagagcaaagcgaagcaatgcagcgaaacccgcacagctaccaaatcgctaccggctaccgaactttctactctttaagtcttatctaccaaccgattacaaaaaaacgattgttttttagacaaaaagtattatgacgaaaatactattgattttaaacatcttcttttgtcggaaaagaaccaatcattgctgaaggatattcaaaactcaaatagtgttggcgtgcatataagaagaggtgactacatgaccaaacaaaatttggttatatttggaaatatttgtacgcagaaatattatcatgatgccataagaataataacagagaaagtaaatgatgctgtcttctatgttttttctgatgatattagctgggtacaaactcatttggatatacccaatgctgtttatgtgaattggaatacaggagaatccagcatctatgacatgtatttgatgtcttcctgcaaatacaacattatagccaatagtacttttagttattgggcggcacgattaaataaaaaaactaatatggtgatttatccctcaaagtggtataatacatttactcctgatatttttcctgaatcatggtgtggaatctaaaaaatggatagatgataattactctgcttatttttctgctctttattattttttttataagatataaaaagaaggctgttctttatataataccattgtctttgttttttacaatgcttcctgttgtaagaatagggggtacgtatattggtctttgtgatgcgataaattttgttatatacgggtatattcttggtcggaaagatgcaaggaaagctatattctgcaatccattgtttttacctttgtttggtaattttatattgttgttattaattgctttgtatggaacggaacggacttcattgtatgtgttgtggaaaacaatatcaaatgaaatacttttgccacttgcatttatctattttttgcgaacaaagaacgatattaaattaattgtaaatctttatttgaaagtgttttgggtgttatgtatatatggaattatagagtttctattaaattataatataattctatattggctgcaatctcagactgatttgtctttttgggtagatcataccaatgatatccgatatggatatgggcgatataattcattttttcattttcccataacatttggagatgcgtgcgttgtattcttttattttcttaccttcttctatagtaaatatgaaggagtatttatatcaaggaaatcttatattaagactttgtgtttgcttcttatcggtgttttccttgctaattcacgtgccactattcttgcattagtatttggattgttgcaatttgactatataagaaagcctaaaactctattaatcgctttttctatctttttaatcatggtcttgccgttttctgattatatattaaatgtatatcattccatatttgattttacgggtaattatgatgttggtggaagctctatggatatgagaatgagacaattagatatttctctttttctgtttttacaaaaccctatatttggtggtggcttgagtatgatttattatttaatgacagatatatcaatcccggaacttgcaggtgcggagtctcaattattttatttgttgattgaacgtggtttgttaggtatattgggatatctatggctgataatttcaatgtgcaaattattgccttcatatagaaagttcaacatggtttttgttggtatctgggtattggcttctttcgtatcattaacagtgggattatatataaattttccgattatatttttgctcattatatataagagtcagaaacttaatttattaaaaagataatgttctctattattattcctctatataacaaggctgattatattgcagaaacactgaagtcagttctgaatcaaacatattgtgattatgaagtaatcgtggtgaatgattcatcgacagataatagtttggaagtggcttctagttttcaggatgaacgaattcatatttatacaaaagaaaacgaaggtgtatcagcagcacgtaactatggtattatgcatgctaaatatgattatattgcttttctggatgcagatgatatttgggaatctgattatttggaatgccaaaagaagttgataggaacctatcctgatgctgggatttattctactgctttctactctttggaaaaggggaaacggaaacttcgtaatgtgttgattaacgaacacatacacttccttgttcatgattattttaaagaatccgtaatgaatggattatctatttgctggactagctccttgtgcttaaaaaaagaagtgataaaggagataccaatgtttcgagtaggtattaagcgtggtgaggatttggacctttggcttagaatagcgttgaattatgatgtagcctatttgaaccttccgaaagtcttttatagaacagggttatctgatagtcttacatcagattattctaaaaatggagaatttccttattacgagtggtttaactttacatcggaaagttcttattatagaaagtatgtgattttagttgtgtatatacatgcaaaaaatgcatttatacatcatgattacgatacatgtttggccgagttgtggagtgttaaaactattgcttggagattcaaatgggcagagcgattattattactagtaatttcatggataaaaagtaaataatgaatatcatttattttgttcccaatattaccattgcaggaggtatattccgtatagtgtcagacaagatgaattatttggcggaaaatatggaaggacggctttttttggcatattatggtaatggacaggaaaaacctatatatcctttgcacccgaacattcaactgttacctattgatatagagtggaaggtaggctttggaaagaaaattaatagagtatggaaaaatataagtattatacgtcacatatttaaaaaatataagatagatattgctgtcaatgccaatgctcctttattgatatggatattaccatttatttgtcggcggataaagaagatccatgagtttcatttttcttataaaggacaacagatattagatgaggaaatttttaaatcgcgaggaaagaaatttttagttcaatatttaagaaagtgttgtttgacaaaattcgataaggtaattgcattaacagagtctgacaagaaaatgtggaatttaccgaatatatttgtaatacctaattttagcaatatacaactacatgaaagaaatggtagaaaaagcaaagttgctatatcagcaggtagattagaatctgtaaaaggttataatcgattgattgcagcttgggtgatagttgcacaaaagtgtccggactggcaattggaaatttggggtgaaggaagtctgcgagaaagtcttcaacgacaaattgatgctttgcatctttcatcagttgttcatctgaaaggtgtttcacctagtataggtgaagtatattctcattcttctttttttgtcatgtcatctttgtatgaaggtttcccgttggtattggtggaggcgatgaattgtggcttgccttgtgttagttttgacattactggagcaaatagtatcatagacaatggtaagaatggatttttagtgccggataatgatgtaaatgccttggcggaagcttgtataaaattgatagaaaataaagtattactagaagatatgggtaagcaggcttatatgtcgggaaaatgcttttcaaaaccaaaggtaatgcaaaaatggttagacctgtttagggaactgatgagagaataaaccgcatgattggaaagaaatataactacatacaaattagtttactattaatatgttagaaaagaaaattgcattgttgacttctgttacatttaataatattggtaacggatttatagatttgggtgctgaagctgctttgatgaaagcattaccgcttaatgctgaattatttaaagttagctcaaatgctaattttgcagctacaatgggacaaatgttcatgctgaaagaaaacccaataataaattggttatgggtacataccatgcaaagggctgctaaaaagcttcatgaccgttcatacaaaacggtaaaaacgcaaaatatctttagtatggccagtatggttaaatgtgattattttataattccgggatgtgtattaactgttccattttttacgatttatggagatttaataaagagaaaagcagaacaaggaagtaagattatttttttaggtgcaagcggaaacttctatacagaatatgaagtcaaatttgtttctgaatatttaagaaaattgcagccttacgctataatgacccgtgatagccttgcctattaagtactatgcaaattttacaaaaaatagttataatggaatagataatgtgttctttgtgaatttacttaatttaccccaaatagatactgatttaacaccgtatgtagtattgaatattgaagaacctaagcattataggataaaagaagaactgaaaaatatttttaaagaaaagaatattgtttattcttatcataagccttttccttatacaaaagttagtaagttagtaaaaaatggagtgatagtatctgataatccaatggattatttactcctttaccggaatgcttcagaagtttattctgatagagtacatgcttgtatccctactttggcatttggaaataaagcaagattgtttagcaatagtcctaggatagccttgtttgaaaatgcgaaaattcctgatgtaagggaaagacttgtcagcatagaaggattaaaagaaatgcaggacaaacaaattgcatttctagcttcattattacagtaataaagagaatggtaatatgaatatattgtttttttatcgtgtttatcctaattatggtggtgttgaggtagtgacaactgtacttgccaatcgttttataaaggatggacatggtgttatcatagcttcaatagaacaaccgcatattgaactagcttgtcaattactaccagatgtaaagcttgtcaaattagactatcctgtttgttctataaaaaatatgaggaagttacatcgattaattataaatgaaaaaattgatattataattaatcagtggggacttccttttatgtcaacattgctgtgtagagtggctataaaaagaacatcatgtaaattgatttcggtattacatggcgctccaaatacgtctaaattaattattaaggcacgtgataaatgtgaaacagtttataacccttttttgaaatacatatatcatgctataatgtatctaaaagaagagttggtaaaagctagcattcgttataattgtagccattgtgaaaaatatgttcttctttcatctcattttatcaagccgttaagtgattatgcacatataaagagaactgagaatattatagcaataggcaatcctgttactattcctgtgtattttgaagaatgggagttaaaacagaagaagaagcagctgttatatgtaggaagaatggattatgaaaataaacgagtaaatagaatagtggaagcttggaaagttctttatgaaaaatatgttgattgggaacttgttttggtgggagaaggcccttataaaagtacattggaagaatatattagaagatatgatattcaacgtgtttgtttcaaaggctttcaagtatctcctcccatacaacattataaggaagcttctatatttttattgacttctgatttagaagggtttggattagtagttattgaaagtatgagttatggagtggtcccagttgtgtatggaagttatgaagctatatatgacatcatagacaatggaaagtctggcttaataactccgataccttataatagtcaaaaaacaattgactgcatcagcttgctaatcgagaatgaaaaattaagaaaagaaatggcaaaggaagccatgtgtaaggcgaaatgttttacaattgattctgttattacaaggtggtataatctgtttgaagaagtattataaacttccataaaaataaattatcatttaatttatgctccctctattgcttaataaaatcatacaaacagataaattgctgtttttacatttggttactcagaaaaacagaatttacacctttctcaaccccgtatcttatctcatagctttagaaaacaaatctttatttgaacaattcgatggtatttttgccgatggctctttactggtttctgccataagattagtatacggaaagcgagtgaccagacgtagctttgatatgacctcccttgctcccgaattgttgaattatctcatggaaagccgtaaaacgctctatatcgtagcctcgggtcaagaacaagtggagtgttctgtgaggatatttcaagagcagtatccggagttacgcattgcagggttcaggaacggatatttctcttcggatgctgaaatgaataaggaagcttctcatatagtcgaattaaatccggattttctgatagtaggtatgggggccttgatgcaggaaaagtttctgcttaaggtaaaaaagatgggttaccaaggcatcggctttacgtgtggtggctttgttcaccaaacggcaatgaataggatgcactattatccgaactgggttgataagatgaatttgcgtttcgtttatagaatgtataaagagaaacatacacgtacaagatatctgcaagctgcattcttgtttccggtacgctttatcggggaaagaattttcggatgaaagagcagactttgcttattgccatgtaaataatggagaatggcaacaacaggacgaagatagcagtaggaataatttttccgagtatttttaatacatctgttttcatgctgcaaatataaattaaaattcatagaatagtgaaattaagaactctaatatttctggggggactctttggaggaatgaatgttatcaaagggcaggctttttatggtactacaggactacttcatgcacctactgccgttatgcagaaagataaaaccgttatgctgggaggaaatatgctggatgtaaatatactttcccgatattgggtgagaagtgaatatcatccctatacctataactattatataaattgtactttgtttccttggctggaagtagcatatacttgtacgttggtaaaggggatacatggttcttcttattggcctcagcaaacttggggcaggtttaccaatcaggacagatcgtttcatttccggttgagggcatggaaagaaggctggtggaaggcttggacgcctcaggtagtgattggtgcgaatgatccgggaagccattcttcaaatggaggtggagacatagattgggggggcggtggtagcggaaaccacaattacttgacacgttattatctggcggcaacgaaacatgttgaatttagtggaataggtacagtgggggttcatgtagcttgggttatcggtaaagctatgagtgatgtgcattatagccgtcctgctgcaggggtaaactttcattttggcatgaagggcgaaggtttctggcagaaagctctgaatggatttaatctgatggcggaagtgtgtcccggacatgcggaagatctgcatacagcaacttatactgtgaatgtgggtggaacttattcaatatggaaagaccatatcaatcttattgctgaactgaataacggtaaattttttagcggaggtatattctttaaattacatcttaaataactgacttgatttctagtggatgaagcattataagaatagccggaatcacttggaaaaagtagttccggctattcttatataacgatatttgtatgtcctgtttttattatcctacaatgtatttagcattcttgccgcttattttacgaatgaataccacaagcagccacgatacgccaaacgccacgattgcggcagcgggaatttgtaaaggcacgggaacaccgatattgcgcattaggactacacccggacctgtgaaaaaataatgtatcatatagatgccaaaaccacatacggtcaagtttgccagcatacgctggatcagttctgagcgtacttttactttcttggctatgaggaagaaggggatagtcatcataatcacattcaaagaattataggtgaagaacagttctaacatttcatcagtgcattgtggtaatgcggtcatgtggcggaaaccgaagaatgtgaccatgtaacctgccagaaacatggggatacagactgacagtgtcttactccatgaccagtcgtggttgcgcagatagtgtcccaatagcaagtacccgttgaatccggcaaaataatagaacatattgaatgagttccacgcacagcctccccaaatgtatggggatacgaactgataataataaggtaacaaaccagttattccccatgcgacaagaaaccatagtttggctttctccgaggccttttctacccatgcggagaaaataggaaggtatagatataatccgataagcagatagatataccacatatgtacgtctaataaagagaaattgagaggcatttctgctatataacccaatgatacgttgagtgactgacgggcggcttcttcaccgctataagggaaaaagtcaaggattatttcaggattaagtcccaacaatcctgtaaaccagggaaataaattataaatgacactccagataaggaacggccagaatacacggctgattctttttttgtagaaagcggatatttcgccacgtacggggagcagcaatgctcctgtaatcatgacaaacagtgggacacacggacggagaaaggctccgtaggcggctccccagaatttgatttcatcaatgttggctggcggttcgccggggtaaaagttgaacgggtctgcactatggcagcaaactatggtgaacatggctaccaaacgaacgacatccagccataccacatgttttcttgtggtgtttatagcaataggttgattcataatttaatttttgatttgacaggcacaaaggtacgctttctctgaggattatttcttgctttggaacaaaaaataaaaagaactatccgcaatcatactacaaaatgagaatcctcccactgcaagagtcacaatcatttgtcttttgcagggggaggaattctatttagggttagagggttattttagtcctctgttcttcaacaagggatcaataccaggttctttgccacggaaattgacatacatgtccattgcatcgtcaatgcagccgggagtgaggatatatttgcggaactttcctgctacttcttgattaaagatatcgcctgtttccttgtatgcctcgtatgcgtcacaatccagcacttctgcccaaatataactatagtaaccggcagtatatccaccacccatggtgtggttgaaataagtggtgcgatagcgtgacggaatttgtttcagcaatccgcgcttacctaatgtttctgcttcgaactgcataacgtccatatcatcgggaatttcttttaatacatgataatccatatccagcagggaagcagctaaatattcagccgtagcgaagccttgtccgtatttgccactcttgtccattttttcaaccagtccggcaggaataacttcatctgtctgataatgtttggcatatacattcaatacctccggttcaaaagcccaatgctcatctatctgtgacggcagttctacaaaatcacgcggaacactagccacaccataataatgtacatctttgaaaagattatgtaaagcgtgtccgaattcgtggaacaaggtattcgcttcgtctgcactgagcaaagcgggttgtccggctgccggtttggtaaagttgcataccacggttactacaggagccactttcttgccgtccttgtaggtctgtgaacgatagcttccgcaccatgcgccacctttcttgctggcacgcggaaagaagtccatatagagtacacctagatgagaaccgtctttgtccttacattcgaatgcctgtgcatcgggatgagggaggggaagattgtccagctgggtgaaagtgataccgtacagtttgttggcaacatagaacacaccgtcacgtacgttttccagtttcagataaggacgtacctgattttcatccaagtcgaatttggctttcttggctcggtctgcataataacgccagtcccaaccttcagctgtgaaggtttttccgtctttctttatttcggcattgatatctgccagttcttctttggctttggacagagtaggtgtccaaatctgatctaataatttatatacggcatccggtgtttttgccatacgttcttccagtgcaaaggaagcatagttttcatatcccatcagcttggctttttccagacgggccttgagcagtttgcgcaccacttccttgttgtcgtattcatttccgttatttcctctgttaatgtatcctttgaatatcttttcgcgcaggtctcggttatcggcatattgcagaaaaggcatgacgctgggattatgcagggtgaaaatccatttgccttccatgcctgcttctttagctgtttcggcagcactggcaatcaggttttggggtaatccggctaagtcttcttctttgttcacgatcaattggaaagcattggtttccttctgcatattttggccgaaggtgagctgtaacatggaaatctcactatttaattcacgcagttttttttgactttcggcatccaggttggcacctccacgtacaaaatctttataggtttcttccaacaacttcttttgctctttgtccaaatcgccgggattttcatagacagctttgatgcgtgcaaaaagtttttcatttaaggcgatgtcatcactgtgttttgattgtagtggagagagttcacggctcagtgcgtccatttcatcattggtattggcgcttttcagtccgtagaatacggtgctgactttacgaagtaacgctccgctttgatccagtgctgcaatggtattctggaaagtggcgggttcggggttgttcactatagcgtcaatctctttctgttgttcttccatgccctgcaaaaaggcgggtttgtaatgttccatcttgatttggtcgaaaggaggaacctggaagggagttgtgtactctgaaaggaatggattttcggtaggggctgcctgtttcccttgcgaaccgcaaccgcttaatatggcaaccgcacaggctgccaaaagaatgtgtttcataataatttgttttatataggtgataatgcaaagatagtaaaataaggcaaattccaataagtttgaagcgtagaactatttgtttgttttcatagtctgtctaattatcatacatcattgtctaataattagacagactgtttctttttgttattttgcaatgtgttgttaatcagttgtttgtttgcgtggcacggttttggcatttatattatagagaacgaattatagaaactttagtttcttatacactttatgggaagtaacgttgtgaaacgggacttctctcttttaaaataataataattaaaaacacgaaatatgaaacagatttattatgtcattcaggctttgatacatggatgtggagctaatattataaaagtcgtttcgttaggcttgggcctgactatgagtattctgcttttctcaagagttgtgtatgagcagagttttgatacttgttttaaggatcatgataaattataccaattgtggaatatatggacagtaaatggagagccttttcctccgagtgagttcattatcggtgcagctgccggaggcatactggatgcaatgccggaaattgtggaatcggcgacaagtacaggctcgtggccggtttcggcacctatttataacgggagtgtccgctttgatgattttaaagttgctgctgattcattgttttttcagacaatgggtattgaggtcttgagtggtgatccggtacgtgaattgcagcaaaaagatgtaattttcctgagtaaagatttggcggataaaatgtttggcggtgagaacccgattggtaaaataattagtttcaataaggaaattgagttgacagtcaaaggaacgtatgctgctttacctgagaattgtactatgcgaccgaaggctgtcatttccttgccttctatctggagccgccggataggaaattattcatggaacggtggggacagctggaaagaatatatccggttgaagcaggatattgatttggatgaattgaacaagcgtattgatatggtagtacagcaacatattcccagaagtgataagttgggaatcactgtcatggcaaaacctgttcgggatacgtaccgtggatatgatgaagtgaaaagaatgcgtaatattatgcttattttaggtatatctattttgtttatcacgacattgaattatgtgttgatttctatttcttcattgagccggcgtgccaaaagtattggtgttcataaatgcagcggagcgggaacgggtactgtttttggtatgtttatgtgggaaaccggtattattattttgctttcattgtttttgatggtttttttaatgtttaatttccgggaatttgtggaagatactacagctgctaaactggagtctctttttgcggtggaacgtatttgggtgccttttggagtgactgctgtcttattcctcattggtggtgtgctgccgggacgaattttttcaaagataccggtcacacaggttttccggcgttatacagagggtaagaaaggatggaaacgtccgttattgtttatccaatttgcaggagtggcttttatatgtggattgatgtgtgtagtgatgctccagtatcattatgttattaataaagatccgggttataatcctgagcgggtagtgattggcgttaataatgcaccggatgctaaagcccggcttgctgcccgtcacttttatgaggggcttccatacgtggaagcattgacttcggcaactagctatccgtctaatggatatagcgggcagatgataccggatgagaaaggaacgagtcttttttccagccgttatgattttactcaggagaattatgtagcttttatgggaatggtcatacagcaagggcgtgtgcctcgtgaatccggtgaggtggcagtgaatgaggaatttgtacggagaatgcattggggaaaagatgttttaggtaagagtatacagacagaagaaggccgtgtcaaaatagtaggtgtgattaaagattttaatattggcggattctactcagagctgaaaccgtttgtcttgcatcatcatcccaaagatttggctgatcttgtttatctccgtctgaaggaaccctttggtgagaatcttcagaaactgaagcgtgatgctgccgaagcttttcctaatcaaacagtcggctttgaaagcttggaacaaaaaatggcggatagttataattccgttcgtgtatttcgtaatgcgactttattggcggcaattgccattttgtttattactttgatgggactgataggctatattaatgatgaattacagcgacgttcgaaagaaattgctattcgtaaagtgaatggagctgagtcatttgcgatattggaaatgttggtgcaagatgttctttggatttctttcccggctgtagtcgcaggtacactaggggcatggtatgtaggtggtttatggatggaacagtttgctgtgactgtaggttcgcttgttccttattatgtatgtgtagctatcgtggtcttgatattgattgtcagttgtgtcatttccaaaacatggcgcattgccaatgagaatccagtaaagagtattaaatcagaataaagatcaatagaacaaacaattaaaatttattattatgatacagattgaaaatttaagtaaggtatttcgtacttcagaagtagaaacaattgcgttgaatcatgtaaacatagaggtgaaagaaggagagtttgtagctattatgggaccatcaggttgtggaaaatccaccttattgaatatccttggtctgctggacaatcctactgaaggcagttacaagttgctgggcaacgaagtagccaatctgaaagaaaaagaacgcacccgcctgcgtaaaggtgtaataggttttgtatttcaaagttttaatctgatagacgaactgaatgtttttgaaaatgtggaattaccgttgacttatcttggaatcaaggccagtgaacgtaaggagcgtgttctggaaattttaaagcgaatgaacttgagtcatcgtgccaagcatttcccgcaacagctttccggcggtcaacaacagcgtgtggctattgcccgtgctgtggttactaaccctaaattgatcctcgccgatgagcctaccggtaatttggactcaaagaacggtgctgaagtaatgaatctattgaccgaacttaacaaggaggggactagtattgtcatggtaactcactctcagcatgatgccggatttgctcatcgtgtcattcatttgtttgacggtagtgtagtggcgaacattaaagaataataatgaaagggtggttgtaatgaaacaaatctattatgcaatacaatcgacattacacggccgtggaagcaatgtgacaaaagtcatatcgctttcattaggcttgactattggtgttctgcttttttcacaaatagcatttgaactcaattatgaaaaatgttaccctgatgccgaccgattggtgttggtacgtggaggaggagagaatgtaaagactggagagaaaggagaaggatatgatgatagcttgtttgctccgatggcagaagcattccgcagtgatttgtcacaatggattgaaaatgctacagtcattttcaattttgagacattaaatgtattcaaggatggtcataagctgaaagacgtaaactacgcttatgtagatacttgctatttccgtactttcggcatcaaagtattgaaagggaatcctgaggaattgcaaagggcagggagcatattcgtttctgaaacttttgttcgtgatgtctttggtggacaggatcctgtgggacaaaaattatctttggataaacagcatgaactgacagtccgtggtgtttatcaggatactccggaaaatacggcctatcattttgattttgtagctcccatttatgccggaggtggttatatagggggtggaacatgggggcgtaatgacatttattatactattctccgtttgcgcgatggggtggacagggaagaaatcaatcgtcagatatacaaggctatgcaaaaatattatcctgattctgctgatgatgaatggagaaatttttatgatgcacagccattgcccgaaattcatctggatgactcaaatacccgcactcgcctttacatttatggttttttgggctttgccatattttttgtggcaatcatgaactatgtattagtagctattgctaccatgagccgcagggcaaaaagtataggtgtgcataagtgtagtggtgccagtgcaatcaatattttcagtatgttcctttttgagacggggattgtggtattgatgtccgttatagtggccctctttattattttcaataccaaagatctgatagaagatttactttcggtgcagttatcctcactctttacattggaaactttatgggttccgatgctcattgtttttgtactgttcatagtagccggagtgctgccgggaagattgttttcacgcattcctgtcactcaagtttttcgtcgttacacagatgggaaaaaggggtggaagcgttctcttttatttgtacaatttatgggggtatcttttgtgatggggattttgttagtatctttgatgcagtatcatcatctgattaatagtgatatgggtatccgtactccaggattggtggaggcggaaacatggatgtcacccgaagaagcagagaatatggttaacgatcttcgtcgtcaacccatggtggaaaatgccacccgttctatgcatggtgttctgggagaatattggactcgtgggctgattgataatagtggcaagcgaatagaaaccttgatgtataatccttgtgataagaattatgctgaaaccatggggattactattattgaagggaaagatatgcagaatgagggagatgtattggtcaacgaagaagtagtgcggctgatgaaatggacagatggggcagtaggcaaacggttgaatgattttgataaagccggaaccattgttggtgtattccgtaatgtgcgcaatacgtcttttctttataagcagtttcccgtggctttggtttatagtcataataccagtcacacttttgatgtacgtttaaaacagccatacgatgagagtttgaaaaagctgaacgaatacatggagcaggtgcattccactaaggcattggaatttattccgatagataccatgctgaaggaaatctatcgcaatgtatatcgttttcgtaattctgtatggattgcttctacttttattttgcttattgttgttatggggttgataggttacgtgaatgatgaaacacaacgtcgcagtaaggaaatagctatccgtaaggtgaatggtgctgaagcttcgactattcttcggttgctgtcccgtgatatattatatgttgctgtcccatcggtcttgatgggaattgtagtatcgtactttacaggaaaggcttggttggatcaatttgccgaaacgatagatatgaatgcgttgtattttgtcggaacagcattggtgattatcgctctgatagtggtgtgtgtcgttgttagagcttggcgtattgctaatgagaatccggtaaagagtattaaagttgagtagtgtatttggaaaaaggagagcgggatgatatgtgttgggtatcatcccgcttttttctttttacctgattcctgtgaaatttacattgacaccatccaatgtgccttttaagaagtttccggccaaccatatattttcaaaatatgaaatgtcactgggaccgtaaaccatacggatacatgtctgtgcgctgttatcccatctccattcaaaattgtatctgtcttcggttacatagccgtttcgatgttctatttgtatgatgtctgtgcctgttctattttcgtaaaagtctagtcgttgtgtgtagtattcaccgtcttgttcccaagtttcctgccaggtccggctgcatagttcccgagtggttctgtaatatatttcgctgtaatcatcatcatcgtaccaactttctatggatacttcacaggaggttaggttaaccattattatcagtacaactaccattccgaagtatttcagtatttttgttctcatatccgttaattttaaaatttgtttttcttatgtcacaaagataagtggagggaatgatacaataaacggaatattcctatttgtaaaggagagtttccctatttgtaataggaaaattcctatggtgaggagaggggaataaggtctgtcttatttcttttactattaaactgtaagttacaaaaagaggctgtccattggtgagacagccctgataatttccgaaaaatgataataggatatttctatatatttttaattatccttgtttgggtattatctgcgtttttttgaagaaagaagtggtgcttcctgtacttgcttcattactctcaagagattacctccccaaatcttccttaagtcttcttctgtatatcctttttcaatcatttttatggtcagattaattaagtcattatctcctttacatccttgcagaccaccaccgccatcaaagtctgtacctattcctacatggtctatgccggctactttaatcatgtggtccaaatgttcggcagcatcacaaacggatgcggcttttgggtttttattgatataggcatcaaggagacataactgtgccactccgccatttttcgctaaggcacggagttgttcgtctgtcagattacggtcatggtcgcataaagcctttgacgaggaatgagaggcgatgataggttgtgtactatattttatcacatcccagaaagtaccttcactggcatgtgatatgtctatcataatacctaaccggttcatttccttcactacctcacgaccaaactgtgtcaatccttgagtcgcatcttccgtatgagtggacgaatggcaaatatcgttatcataagaatggcagagagttatataattaactcccatctgtttgtatttttttatattctttaggtccttgccgatggcgtaaccattctcgatccctataaagaaagctttcttgccttcattctttaaacgtaccaaatcctcttccgtaagggcgatgccgcaaaaatctttgtattttgctacttcgtcataaatggattgaatcaatagggtggtgctttctacggctttttgtgaagatacgtcatctcgtttcccctgccatataaatgcggctaggaactgtgcgtccaatttgccttcctccattttggggatgctgaccatgttgtcttttctcaagcctacgctgtaaccgtttttaaaccaaagaggagtatctgtatgagtgtcaatggatagaatgcggctgtgaatttttttagctaggttgaatgtatcagccttgttcaccaggaatttaaataatttatgcatggtggtatctccggcagctgtaaatatttccggatgaaattgcacacctatcatttgccgtatgggataagcttctatagcttccgctatgctgtcgggtgcccaagccgtgattttgaatcccggtgccaattcccggatagcctgatgatggaatgtattgacttgcagcacttcttgtcctgtaatttctgccaacttgctttcctttatgatggatatcggatgggtgggggtagtgccggattctttttggcgatggttgacacttgaaggatgttgcgtgggcagatcttgatataaagttccaccgaaagctacattcattaattgtagccccctgcaaattcctaatatgggaatattccgatctgcggccattttcagcaccatcaagtcgaaggtatcccgggcggggcttacttcttccagtttttcataaagaaggtcgccataatacattggttggatgtcttctccacctgtaaagacaattccgtccagtcgggatacaatttgacgcagtatttctacattatccgttacaggtatcatgtaaggaattcctccagagagaatgactgactgtacatatgccgtgtttacggctgtccgtttcggacttatatctgtggaaattccaatcaagggaaacctttttattccgggaatcaattcggaatccactttttgattcaaccggacgagtgcttcggacaaaggatccttttgacttttttgtgcttgtacatggcaacatcccaaagctaacagtaatactaagaggcatttgtttttcatatgaatatagattttgtcttgcaggcaaatgtataaactatgtttttattgaaaaaataaaatgccataaaaatagagtaggaggtacttattccaagcacctcccacctttatattcagaaaatattcaatttacttcatatcttccacagcagcctgcgccgcagccagtctggcaataggcacgcggaacggagaacaagacacatagttcaaaccaactttgtgacagaatttcactgatgaaggctcaccaccatgctcaccgcagataccgcatttcaaatcaggacgaactgaacggcctttatctacagccatttcaatcagctggcccacaccattttggtcgagtacttggaatgggtctactttcagaatcttcttttccagatataccggcaagaaagaagcaatatcgtcacgggaataaccgaatgtcatctgggtcaagtcattggtaccgaatgagaagtattctgcacggctggcaatgcggttggctgtcagcgcagcacgcggaatttcaatcatggtacctaccttgaacggaatttccataccttctttttcaaataatgctgctgctgcatcacggatcaccttttcctgagcttcgaattcatacaggataccggtcaagggaaccataatttcgggatgcggatcatatccttctttcttcagttcaattgcagcacctagaatcgcttgagtctgcatctctgtgatttcgggataggtgttacccaaacgacagccgcggtgacctaacatcggattgtgttcacacaggctttccacacgttttttgatttcctgtacggttacgcccattgccttagccatttcttcctgaccttttgcatcatggggaacgaactcatgcaaaggaggatcgagcagacgaacatttaccggacatccgtccatagccttgaagatacctttgaagtcggctttttggaaggggagcaatttagccaatgcttttctacgtccttctacatccggtgacaggatcatctcacgcatagcgacaatcttttcagcatcaaagaacatgtgttccgtacggcaaagaccgatacctgaagcaccaaaagcgcgggccacttccgcatcatgcggagtatcagcgttagtgcggacattcagcttggtgtatttgttgcaaagatccatcaatgcagcgaaatcgcctgaaacttcggctgctttggtttccactttacctttatatacttcaccggtagtaccgttcagagagatgaagtcaccttcttttaaagtaataccttcaatttctacggtacgtgtcttataatctacattgatagcaccagcacccgatacgcagcacttacccataccacgggccacaaccgcagcgtgagatgtcatgccgccacgtgcagtcaggataccttcggcaacggccatacctgccaggtcttccggcgaagtttcgatacgtaccatgaccacctttttgccatcggcagcccatttagcagcatcatcggcgaagaacacaatctgaccggtagcggcacccggggaagcgggcaaaccacgagtcaaaactttcgcttctttcaacgctttcttgtcgaacacagggtgaagcagttcgtctaatttattaggttcgcaacgctccaatgctgttttttcatcaatcattccctggcgcaacaagtccatggcgatttttaccatggcagctccggtacgtttaccgttacgggtctgcaagaaccataatttaccttcctgtacggtaaattccatatcctgcatgtcgcgatagtggttttccagtttggtctgcagggcatccagttctttgtagatttccggcatagcttcttccatagagggatatttggctacgcgttcttcttcagaaatacctgcacgttctgcccaacgctgagaaccgatttttgtgatttgttgcggggtacggataccggctacaacatcttcaccttgtgcgttgatcaaatattcgccattaaacaaatcctcaccgttacctgcgtcacgagagaagcaaacaccggtagccgaagtatcacccatgttaccgaataccatggcttgtacgcttacagcagtaccccattcggcaggaataccttccattttgcggtaaagaatggcgcgttcgttcatccagctgcggaatacagcacaaatggcaccccaaagttgttcgtatgcacaggtcggaaaatcttgtccggtctgttcttttacagcaactttaaagcgtttaaccagttctttaaggtcttccacttccaattcgttgtcgagcttcacacctttttcttcctttactttttcgataatttcctcgaaaggatcgatgtcttccttgttcaccggtttcatacccaataccacgtcaccatacatttgtacgaaacgacggtaagaatcccatgcgaaacgggggcgtccggtcttgcggctcaagccttccaccacttcgtcatttaaacctaaattaaggatggtatccatcatacccggcatagaagcgcgggcacccgaacgtacagaaaccagtaacgggttctctacatctccaaacttggaattcatcagattttcgatgttggcgatagctttctcaacatccgctttcagcagttctactactttatctttacctaactcataatattcgctacaaacttctgtggtgattgtaaatcccggaggtacgggaacaccgattagattcatttcagccaggttagcgccttttccaccaagcagatttctcatgtctgcttttccttcagcttgtccattaccaaaggtgtaaactctttttttatccataataaatgtatttaaagttaactcgctcaaaaaatgtaatcgcaaaactatacatattttagttatctccaaaccttttactgaaaaaaaatagtggaaattgcaatttctactttgcaattttaatatcttacgatttatgaggcaatattcagggaaaatgcttaaatttgtccccaaattaacttattcagaaaagtggctagaaagaagaaagaacttccattattagagaagataaccataacagatgtagctgccgaaggaaaagctttggcgaaagtgaatgacctggtagtatttgtgccttatgtagtgcccggtgatgtggtggatttacaagtgaagcgtaagaaaaatcattatgcagaagctgtggctgtgaaattccatgagtattctcctgtgcgtgcagtacccttctgccagcattatggtatatgtggtggttgtaagtggcagtgtctgccatatacagaacaaataaagtataagcaaaagcaggtgacggataatctgacccgtatcggcaagatcgaattgccggaaatttcacctatcatagggtcggaaaaaacggagttttaccgtaataagttggaatttacgttttctaacaaacgttggctgacagaggaagaggtaaaggaagatgtgaagtacgatcagatgaacgccgtaggtttccacattcccggtgcatttgacaaggtactggctatagaaaagtgctggttacaggatgatatcagcaaccagatacgcaatgcgattcgtgactatgcatacgaacacaattattctttctttaatctgcgttctcaagaaggaatgcttcgcaacttgatgatccgtacttcgagtacgggtgagcttatggtgttgctgcaatgcaagattgtggaagagagcgaaatggatctgatgaagcaactgctggctttcgtggcagaacgttttccgcagattacttccttattatatgtagtcaataacaaatgcaatgataccattaacgatctggaggtaatggtgttcaaaggcaacgatcatattttcgaggaaatggaggggttgcgcttcaagataggagcaaaatcattttatcagactaattccggacaggcgtataatctttataaggtggcccgtaattttgccggattgaccggtaaagaattggtgtatgatctttatacagggactggaaccatagccaactttgtttcacgccaggcaaagaaagtgattggtatcgaatatgtgcctgaagcaatagaagatgctaaagtgaattcggcaattaatggcattgacaataccttattttatgccggtgacatgaaggatatcctcactcaggagtttatcaaccaacatggtcgtcctgatgttattatcactgatcctccgcgtgccggaatgcacgatgatgtgattaatacaattctttttgctgaacctcagcggattgtgtatgttagctgtaatcctgccacccaggcacgtgatttgtctttgttagatgccaaatacaaggtgatggccgtgcaacccgtagatatgttccctcatacgcatcatgtggaaaatgtggtgttgctggaaaaaagaggataatccggatagttcaattataaattgtttaaacagtaaatagaattatgtcaagaggtaagaatagtgattccggcaggccaaaggcgagaagtgttgcccgatatactatatataatgtgacggagcccgctgagctgatggattttctgatgcggaaaatggcgggaatcagtcgtagcaaggtaaaggcgttgcttgccaaccgcgtgattttggtagataatgtgattactacccaatataatttcgcattgaaaccaggtatgaaagtgcagatatccaaggtgaagaataatcgtgagtttaaacatccgatgctgaaactggtatacgaggatgcttatatcttggtggtggaaaagaaggagggactgctttctgtcagcacagaacatcagaaggagcgtactgcacaacatattttgaatgagtatgtaaaacgttcacatcgtttcaaccgcgtatttgtagtacatcgtctggaccgtgaaacttcggggttgatgatgtatgccaaagatgaaaaaacccagaatactttacgtgataattggcatgatattgtgacggaccgccgttatgtgtctatcgtttctggtgatatggagaaagattacggtactgtagagtcttggttgaccgaccggaaattgtatgtctattccagtcctgtagataatggggaaggtaagtttgcggtcactcattataaaacaataaagcgggccaatggatattcattggtggagttggatttggaaacaggacgtaagaatcagattcgtgtgcatatgttggatttaggtcaccctgttgttggtgaccggcgctatggcagtgagtgtgatcctttaggacgattggcgttacatgccttcaagttatgtttctatcatccggtaacaaaagagttgatggagtttgaaactccttatcctacggcatttaaaggattaatgcagaaaaaatagaaagtttcttctgttaaaattaaatataaggcttctttgcatttattttgggcagaggttaagaataaaaaagcaatatccatccatttaccaaactgtagacggatggatattgttgtttttagagatttggcagtttcattattaaattgcctttcttaatgcaagaatggtcatgtagtccgtaagcattcggcctcgtgcgtgtttctctccaagttataataaagtcaaaagccagacgaagcatgtctggcttttgactttattatagctttcctgtttatcctttccaattaaatggcagtaaatcggtgtaatcgtttttctcttctctttctttctcctgtaccctaatcagcacgtcctgcatccatagttttgggttcaccttattttccctacagcatcccatcagtgaaaagaaaattgccgctgcatgtgctgcctcatgtgatccggagaagagcgtattttttctgtttaaagtcaacggccttatagaacgctccaccggattattgtcaatgcagaactgtgcgtcattgacatatccggacagttgttcaaagcgtgtgtacatatagaacatggccttggcaataggcgatttatcgaccgtatgtccatattcctccttgcaccatttttccagttctttgataatagggtacgatttttcccggcgaagctttaccaccgcctccccttccagatgttccattctgattttctcctccacggcatacagtccgcctatttttccaagtgcatgccttgctctgggagggtcatttccttccgcttccacaaagttgcgcctgacgtgtgcccagcagcacagatgcaactttccgggtagcgtgtcgaacttgtcatatactgcaaagccgtcactctgtaccacccggacctgtcctgccagcagtgtgtctattccgctgctgccacggcccttgtgatattcaaagaagggggtatggaaccggggcagatagaagttccacatatacccgcggtgaagagcaccgggccggtcgctttcaagtacgggatggggtgtctcatcggccatgacgtaatagctgtccttgaccagttcacgaagttcattatagattggttccagacgctgtgcggcagccatcatccagttacttacggtggaaggactcagatggattccttcacgctcaaagatatccagctgtctgtgcagaggcaggtggtcgtaatatttggcggtagcaatgtgggccagtacactttccgaggcattgctgtggggatgtgccattacgggcatgggagcggttatgatacgaccgtcggcgagccggtatttaggacggatgatgcgtttcacatagaatcgggcgggactgacagcatactgttcgctcacttcctctcccagcttcgtcgctccctccaacgaaaggccttccggcatgggaatgataatctcctcacggggaagggacgggtcgatgggcttacgggcgtggggagtgatctttttcgtgaagcttttacggaaacgattgtagccattctccgatgtgacggatttcccagcggttttctgttcttccgctaccgggtcattgacatcggacggagactcgaaacagatgctcagctggccggcatcttcgggaagatgacgtttttcactggatttaccccataaacggcgtgtcaagtcagccaatttccatctcagatcggcaatgacggctgtacaggccgagatttcttcgacctggcgggaatactcctgcaaagaggcttcgtattttctctgaagttccgcatgctccttttcaaggcattcatgttccttgcgcaactcttcgtactcttccaaagtaagggtaataaccggttctttcactgtacatccactttttattatgtggcaaagttatcaaaataaaactgcacggcttatagaatggggaattacttttcaactgttttccgatactttttaacagtaagcagctcattcaggcgattccaggaaatttgaagaaaatccttcttccgttcctcctttttcaagaggaaagaaccgcgattcagacgacggcattccagacggtattcgtcgtcgcaccgataaaggatatgcaacctgctacgggagcggtcgggaaaaatatgacagctctgctctgacacgcaggaacccgtgtgtcggatgacctcgccacaaagaccgtcaatacctttatggaaattacaaccttggggataaaggtaataagaccaaaaaggactgctgcggaaaaggccaagacctaaagggagaagtaggtcctgaggggaatggataccaaggctggaagacgaaactttataacgacggccgccatcaaatatgaaaagaacagaatcaaaatggttagactcggaaaagagagtacgtagtttatcactttcgctagaaaattctaatactgaacacataatggattaagattataatgaagccacaaaggtaggaaggaaaagaggggaaaaaaacacgcacgaggccgaatgcttactgtagtccgatttcccaatgttgtattgatgaataaaaaggctgaaattcaagataaatttgattcagcctctttattattgtatcggcgaagtgatattgaataaaagagttttttcaatagatgtgatcatataaaatctctaacgcacgtatgtctacatgaagctacgcatatgtatgtacgggtttgtgcgtatgtatgtgagtgtgaatcatataaatcccccaaatataaggacgtttttaaaaaagatcaagagcttttcaaataacaacaggaactttttggaaaagataacgagcttttttaaaaacgttttgatcttttttatcgatatcggaactctgtaaactgctatttcgtggaagtacatctctttcatatgcatttttgaaatgaaaaagtctgaaagtaccctgctttatatcaaacaggaatactttataaaaaagaatatatagttgacagcaagcgtattatgcgaaaatctgctttaaaatatagtgagggtatgagggcataagtgagagcaaatatttttactataatcatgtaagctatttataattagattgttatatgtaaaatgagagcatgagggcataagcattccagaataataatgagtatgatgttggtttgctggaataaaaaatgataccgacttatcacaagccggtatcacgaaaaaataatcactttattattttgtaatcatccagctttgtgcgctcacaaagcacggggaataaaaagttatttatatactaacactgtaaacaactactttcacaagctattgtttactcacctaataaaaggtagcttaacaaatatcacttaatgttcattttttgtttgacattacaaaggtaacacaaaaattgaaaattatactatatagttctaataacggataatattgcggtaatttaggcgttatttgagccatttatctaaccaactaaagaaagtgcgttgccataacaccccattttgcggtttcaatacccaatgattctcatccggatataataaaagttcggccggaacaccgcgcaatacagctgcattgaacgccgacataccttgtgaagcaagaattctataatccttttcaccgtgaatgcagagaatgggagtgtcccatttatcaacgaaacgatggggagagttggcaaaggtacgttgtgccgttacattgtttttgtcccaatatgcaccacccatatcccagttggcgaaccacatttcttctgtttccagatattgctgctccatattgaatataccatcgtgtgcgataaatgctttaaaacgtttgtcatggtgtcccgccagccaatagacggagaatccgccgaagctggcacctacgcatcccaaacgattagtatctacatatggttcttttgaaatatcatctatggctgacaaatagtctttcatgcattgacctccatagtcaccgctaatttgttccaaccattccatgccgaatccaggtagaccgcgacgattcggagcgatgataatataatcgttggctgccataatctggaagttccagcggtagctccagaattggctgacgggactttgcgggccaccttcacagaataataaagtaggatacttcttgtttgcgtcaaaattgacgggatagatcacccatgaaagcatttgcttgccatcagtagttttggtccatctttcctccactttgcccaaattcagctgtttaaagatgtgatcattctcgtgtgagagttgcgccacttgcccgtcggcaggagtgagggtgtagatttcatcggcggcactgatagagtgacgtttggtaattattttatcgcctgccatggctactgatccgtagtcatacatgccatcagtcagtttttttatatcaccattcagattggcactgtataccatgctggttccatgccatacaccgacaaagtacagactttgcgaatcattgttccagcaatagtcatctacgcctgattcaaaactttcggtaacaaatgtcttttgaccgtcatctaaattgtagatgcacaggcggttccggtcactttcgtaaccatcgcgctccatgctttgccatgcaatgtatttgccgttggggctgaatttaggattggtgtcatatcctttcatttcatctgttccattcgaatcttttccattcggtttgcacaggttcagtgttgtgcctttttctatattataaaggtatatatccgagtcggtagatactgcgtatgccaatccttgctttttccggctggtgtaagctatttgtttagagtcgttgctccaagccagctgctcgatacctccgaaaggtttcattggagcttcaaacggctcaccttccatgatatcggtggctgctcccatcatgttaccatcaaaatcagcgataaaaggatgtggaatactttctacccattcatcccaatgtttatacatcaggtcgtttacaatgataccgctggctttgggtaggtcagggtagaggtccacagtgcgttggccgtattttatttgtgagatgaaaagaatctttttgccatccggtgaaaaagagaatccttctatgtttcctttgaaatcggaaatgatacggcgttccgtaccgtcaggattcatctcccaaatttggctgccaccactttcattgcataagaatgcgatttttgttccgccttttatccattgaggctcgctttcattccatgctgtttgagtaagcagggtgttgttctttccatcggcatccattacgtaaattacatgatggcttttgttttcgggaacactataataggctacggtgtaggctatctttttgccatcgggggaaatactcagactgcctatgcgtcccattgcccacagggcttcgggggtaagacgaccgtctttgatggtgatttcttgcttgcctataatgggctcgtagccctgtccttcctgtttcacttcggtacaggaagaagctagcataagtgctgctgccatgatggttgcgcttgatttattcatatctaaaaattgtttttgatgattaactgattgcaaaaatacgtataaaagccggtgatgtgaaatgttcctgcatatttgttttgtttctttgtgtgtctgtggaagggtgtctttgcaaagaagagcaaatatagaggtaaccggcatatataaaaaaacagcaaagactgctgtttttttatatatgccggtcttcgctgtttttttaaggaagtgtaaacccgttattttttccctttattcattctttcttgttgcagtcgttcctgctccttttgtaaagcttccagtttagccatcagtccgccacccggtttgccgccattcttttggctcttcttttcttttcgggcttccaacatggcaaggagtttcttttcatcagttgttttgcgcagaatcaccatggtgaggataccaatcagtccggaaatgaagtaatagtagttcaagccggatgaataaccgttgaagatgaaaataaacatgactggcatgatatacatcattagtttcatacccggcatttgctgttgtcccatatcctgctgcttcatggtgtacatggtgttcagaatattggtgatactgaacagcaaacagaagaggcttaaatgattgcccagcagaggaatgttggttccccagttgataatatcatcataagtggacaagtccggggcccataagaaactttgttggcgcaactcaatagcgttaggcacgaagaagaataaagccatgaataccggcatttggatcagcataggcaagcaacctcccatagggcttactccgtatttgctgtaaagtgccatcgtttcctgttgctttttcaaagcatcttctttcttgggatattttgcgttgatctcgttgatgtagggtttcaggacgcgcatcttggcagaggacatatatgatttgtaggtagccggataaactaacactttgacgataatcgtcatcagcagcaatacgacacccatgctcagtccccaccctgagagccaatcaaacaaattaatagtgaaccagcggtttacccagcggataatgggccagcccaaataaaccaggtcttccagttccaaatctttttgggaaaggcttagatcattgctgttcagcaaagtcttgaaatggttcggaccgaagtagaactgcatatcggtaggctgctttccggtaggatcaaagaaagttgtcatgtccgcggtatagttcttcatatatccgcttccttcctgttggggggtagaggttagggaagctttatcaaaatcttgatcggcaataagtacgcttgagaagaactgattcttgaaagcaatccaatccaaacggtcggtaacatcttcttttgcttctttcatttcgttcagatagtctgaacttttttctaccggcttgtaggtgagcgaagtatagcgctgttcgaagctgaaacctttttcaagctggcgtgcccgttgacgccagtttatattgactgtgttcagggcaggagggaagaaattctgcatgccgtttgcgcgaatagtgaaattcaccatgtaagcatccggtaaaagtttgtaatcgaaatctatatagcctccattgtttgctgccaaacgcatagttacagtgctgtctgttacgttggtaggctggaaatacatatcctcggtcaaaatattttcattctttccttcgaaagcgaaattcatgcccgaatctttttcatcaaataacatcaaaggcttgccgtcctgtccgttataatcttttaatatggctgcgcacacccgtccacctttattggtgaaagtcagttttactacattattttccagtgtcgttagctgttccgtaccttggtttgcgccatagaacatagaggtagagtctaaatgcaatgttgcattctgactctgtgccgtggcagcctgtgccagtcgttcggcctctttttgggctatcgcctgaatggaatcctgataatgtttggcacgtgccatttcttcctggctaggacggttgtagatgctgaagcctatcacaactgcaccaatcagggcgaatcccactaaagtgtttttgtccatttttacttgtttaccttattatattataattctcgtttcttatttgtctattgccgctttgataaatgacaggaataaaggatgtggtttcaatactgtactgctgtactcgggatggaactgtactccgatgaaccattttaatgtcgggatttcaattatttccactaaatcggattccggattgatacccacgcatttcatacccgccttttcgtactcctgcttatagtcattattgaattcgtagcggtgacggtggcgttcctgtatgtgttcgcttttataggcttcaaaagtctttgagtgttggtcaaggatacattcataggctcccaggcgcatagtgccgcccatattggtgatagctttctgttcttccataatgtctatcacgttgtgtggcgttttttcatccatttcgcggctgttggcatctgtataacctagcacgttacgggcaaactcaatagccatgcactgcatacctagacagataccaaaagtcggcacattgtgtgtacgtgcatatttgatagcaacgaacttaccttctatgccacgttgtccgaatcccgggcagatgatgataccatccatatccttaatctgctcttctacattagcatctgtcagtttctcgctgtttatgaagtggatatccgctttgcggtcattgtaagtggcggcttgtgacaaggcttcaaggatagatttataagcgtcttgcaaatcgtatttaccaaccaatccaatttttactttctcagttgccttatgacggcgatctagaaaatctctccatggaccgagggttggagtttcacccacgggcaatcccatcttttggagaatggttacatccagtccctgctcttgcatacgcaaaggtacttcataaatggtgggcatatcgatagactgcaccacagcattttcatctacgttacagaacagagcaactttctttttcaagtttgtgctcaattcgtgctcggtacgcaataccaatacatctggttgaataccaacagattgcagctcttttacagagtgctgggtaggtttggtcttcaattcgcctgctgctgccagataaggaacataagtaaggtgtacgcacaacgcattacgtcccatttcccatttcaattggcggatactttccaaataaggaagtgattcaatatcacctacggtaccaccgatttcggtaatgacaaaatcaaatttatatttgcttcccaataattttacattgcgtttgatctcatcggtgatatgggggataacctgaatagtctttcccaaatagtcaccacggcgttctttgtcaataacacttttgtaaatacgtcctgttgtaatgttattggctttagttgtctggatgcccaaaaaacgttcgtaatgtcccaaatcgaggtcggcttcgtgtccgtctaccgttacataacattcaccatgttcataaggattcaaagttcccggatcaatattgatatacggatcgaacttctgaattgttacattatagcctctggcttgcagtaatttacctattgatgatgaaataatacctttacctaatgaggaggcaacaccaccagttacgaagatatacttagtttctcccacgacttaatatttttaaatgttattttcttaattatcaaaatcgcaatatttatcaaagttgcaaaattacaaaatctttttcaatattgtcggatatgctttaaaaaatcatttgatgaaactgaatttatcattcgtcactatataaaggaaacagtttttggggaaaaggaaaattaagtgtacttttgcacaaaactaaaattagtatgagaaaaagtatatgtttggctataatacttgctgtattctgtatggaagaagtgccggcacagaaaatagccaagacgaaagaaaattcggctgtgaaagtctactctgattcattgtcagcattgagcgcatcttattttgcttatttcaggctgtgggatgatttgaatattccggcgccccggcgggtacgtcctaatccggctttttataagttgtttgttccgcccacttattatgaagctcctataaaagaaatttttgaaataaaatggagtccggatacgaaaataatgacagctgtcgattcgctatatatgggaaagcgtgactctgcatctgcagctatatatcaactgcccgatttggaaaccttggccgctgctgaccgttggtcgaataatatattaaggaattattatttgcaatatccgggcagattggtgaataacgaactttatttggctgatttgaaaccactggaaaataatcagatagtaaaaagaccaaggaaagagagaatcaaaagtttccttcaaccggaaacaccggtggaaagcttgactacggataatgaattgttggtggtacgccctaacttttggacgcataaggggaatgggtatgttcagttcacacaacattatatttcagataactggtataaaggtggtgaaagtactaatgcgctgttgtccggcttagtgctggaagctaattttgatgaccgccagcgtatagagtttgaaaataagctggaaataaaattgggttttgttacagcaccgtcagatacagtgcataagtataagacgaatgccgacttgcttcgtttaagcagtaaactgggtgtaaaagccttcaaaaactggtattatactttggcgggcgagttcaagactcagttctttggaaattataagacgaatacgaatgatatgatttctaattttctgtctcccgcccaattggatataaccctcggtatggactttaagcagaataagaagaattattcattgtctttgttgggatctccactggcgtatacttttatgtatatcagcaatgataagataactgatccgggtgcttttaatgtggatccggggcataaaacagcgaatctcttcggttcgaaatttacaggtaatctgacttggacaattatccccagtattgtgtgggagtctaaattggagtactttacaacttatgacaccgtaattgccagttgggaaaatacatttaattttgtgttgaaccgttatttgtctactaagttgtttgttcatgcgcgttatgatgacggtgtgacactgacagaagataacaagagttatttccagttgcaggaattgcttagttttggtttgaattatacttggtaagaaaggagagtgtaagcgatatcgatggagaaccaataaaaacacggatgccgcagaatatcaaattctacggcatccgtgtttttattggttctccattttatttatgttcacccagcaatgtttgtacaattctttctgcagcgtgtccatcccaacgttccggcaaatgtcccttctgccattctcctttattcagaatgtcaaggacgtctgccaggatttcagagctttcccccaccagccggtttgtgccgattgtcactgtttcgggatgttctgcatacgtgcttaatgtcatgcaggggattcctaaaaaagtagcttcttccgctacattgcccgaatctgtaatgataccccaggcatggttcactaaatatccgaatgacaaataaggttgcggtggtaatatatataacctttcggaagtaattcctaaagcagacagcttgttttttacatatgtatggagcggcgccacgatcggcttgtctgttttttccagtatagtgcggaagatggctttcagtgttgtgtccttgtttagcaatgaatgtttgttcaatgttagcaagaggtattctttttctttcagtcccataatggagaacgctaccgggcgctgtaaacgggtacggttataacgcagcgtatcaatcaggatgtttcctacaaaatgtacatgtgcctgttcggttcctgtttgattcagattgcggttggctaccattccggccgtgaacagataatcggacaagccatctgttatcatgctgttcacttcctttggcatatccatatcgaaagagcgggttccggccactagatgagcgacttttatccctttctttttagctacgatagagcacgccatagtaggagtcaggtcatccactacaagtactacctgtgcaggatgctgttccagttcgcgggcgaaagcaaccaatatacctgccattcgctggaaaaaatctgtattatctacatgcagatatacatcgggacgcggcatatccaggtctgtaaacagagaaggttccaaacttttatcttcgtccgaacctgtgtagaccagacgggcagtgatattttttcctgctgcctttgcagccttgatagcacgcattaatggggcaattttcatgaaattgggacgtgcacctgcgataattgttactttcatcttattttaagctattttctgaacacaaaaatacattttcttatcgaatttattcgttactttgcagacaaataacaaccattatgctaacatttgttcaagttttagattttataggcacgtttgcctttgccatcagtggtatcagattggcgtctgccaaacagtttgactggtttggtgcatatgtagtgggtttggcaacggctatcggaggaggtactatccgtgatgtgcttctagatgtgactccgggttggatgaccgaccctatatatttaatatgtacaggacttgcattgttttgggtaattgctttcggcaagtatctgattcatatgcataacacttttttcctgttcgacagcatcggtctggcactatttacagtagtgggagtaggcaaaagtattgctctcggatatcctttttgggtagctataatcatgggtagtatcactggggccgcaggtggtgtgctccgcgatgtttttattaatgaaattccgcttatttttcgtaaagaaatttatgcaatggcctgtgtggtggggggattggcctattggatatgtgatctgtttggtctggaagcctttatttgccagataataggaggtagtactgtgtttttggcgcgtattttagctgttaaatatagtatctgtttaccaattttaaagggggaacaacgctaaatagcacctgaaaactatcaaaacagggggtaaaaactgataaatgacggtttttaccccctattttgatagttttttctttgacacctatttaaaatgcgctatccttgcattaccgagagcatggaaaaagaatatgaacctaaactgaaagacttatgaatagcgttagttttaaaaagaacctgctgggtgtgcaagaagaattacttcggtttgcatacaaactcacagccgaccgtgaggaggctaatgacctgctacaagaaacttcattgaaagcgctggataatgaagacaagtatatccccgatacaaactttaagggatggatgtataccattatgcgtaacatctttataaacaattataggaaaatcgtgcgtgaccagacatttgtggaccatacagacaatctctaccatttaagtatgcctcaggattccggctttgatagtaccgagggagcttatgacatgaaagaaatacatcgtatagtcggtttgcttcctaaagaataccgtattccattcgctatgcatgtgtcgggatttaaatatcgtgagattgccgaaaagctgggattgccgttgggtactgtaaaaagcagaattttttttaccagacaacgcttgcagggacagctccgtgattttgtataatccaagggggaaaattatcaaaaaggtagagtgaaattcttttgctctgccttttttgtttttattggtttacaatatgatattaaacatgtttttggaagctaaaaaacagcttcgaatattaactttatttttattcatttgttatatttgcaaaaggacaagacacctttaaatcaagtaataattatgaaaaaagaaatcaaattcagtttggtctaccgcgatatgtggcagtcatcagggaagtaccagcccagagctgatcagttagccaaaattgctcctctaatcgttgaaatggggtgttttgcccgagtcgaaactaatggaggtgcttttgaacaagtgaacttgctatatggtgagaatcctaacaaggcagtgcgtacatttaccaagcctttacgtgaggcgggtattcagacgcatatgttggaccgtggtttaaatgcattgcgaatgtatcctgttccagctgatgtacgtcggttgatgtatagggtaaaacatgcgcaaggagtggatattactcgtattttttgtggtttgaatgaagttcgtaatattattccttccataaaatatgctaaagaagcggggatgattcctcaagccactctttgcatcacttattctcctgtacatacggtggattattattcttatattgccgaccagttaatagaagcgggggcacccgaaatctgtttgaaagatatggcaggtatcggccgtcctgaaatgttggggcagttggtgagaaatatcaaagataaacatcctgaagtcattgtacaatatcatggacattccggtcctgggttatctatggcatctattttggaagtttgtgagaatggtgcggatatcattgatgtcgctatggagccgttgtcatggggaaaagtgcatcctgacgtaatttctgtacaggctatgttgaaaaatgcaggttttcaggtacctgaaatcaatatgaaggcttatatgaaagcgcgtagcatgacgcaggaatttattgatgattttttgggatattttattgatcctaccaacaaacatatgtcttccttgctgctgggatgtggacttcccggtggcatgatgggttcaatgatggccgatctgaaaggggtgcattcgggcatcaatctgattctgaaaggacagggaaaggaacctatgagtttggatgatttggtagtgatgctgtttgaagaagtggaatacgtatggccgaaattgggatatccacctttagtaacaccgtttagccaatatgtgaagaatgtggctttgatgaatgttatgcaattggtgaagggagaggagagatggacgatgattgataaccatacatgggatatgattttgggaaaaagtggaaaattgccgggtgcgttggctcctgaaataatcgaactggcgaaaagtaaaggctacgaattcactgatgaagatcctcaggtgaactatcctgatgagctggacaagtaccgtaaggagatggatgataatggatgggaatatggtgaggatgaggaagagttgtttgaactggctatgcatgaccggcaataccgtgattataaatcgggtgtagccaagaaacgttttatggatgatttacaacgtgctcaggatgcggctatggtaaaaagtggcttcgatgaggaaacgatccgaaaatataagcgtgctaaggcagatcctattattgcaccggataaggggcagattttatgggaagtttccgtggaaggtccttctatggcaccgtttgtcggacggaaataccagcatgatgaagtgttctgttatatttccactccgtggggagagtatgaaaagatttttgctaattttacaggacgtattgtagaagtttgcgcccaacaaggagctgtagttaataaaggtgatgttatagcttatttggaaagaacagagtttactgcatgatttaaaggtgctatatagctttttttatccgctatggcaagtgttgaatttgtcatggcggatgtttttatcttttcattcttttaaaatttgcattcattcagttatgtgttatctttgttgccatgcagaaaaaacaggtagataagaaaaaatatatgagaaagctgtatccgtggttgctgggaatgattttaggaataatgccttgtatcgtttcagcatcagaaaatgacagtataaaagtcgagagtctgcttcaaaaagctgcccggttgccggccgatagttgtaggatattgttttttgcccaaaatctattaggggttccatacgtagcgaatacattggatgggacagatgaagagagattagttgttcatttggataaggtggattgtactacattagttgaaacagtacttgcattgagtctcgctgacaagtatgggaaaagtgactttgaaagttacaaaaaagcgttgctgtgtatccgctatcggaatggaaaacaagccggttatgtctcgcgtttacattacttcagtgattggattaaggataacgaacagaaaggaattgtacatgaacgtacaggggaattagggcttgctgtatcacaaatcttgaatttggattttatgtccacacactctgacaattatcaccggttgaaaaataatccttccatgatatcccagatgattgaaatagagagaaaatggaaaaatgttcctgtttcttatattcctaaaacaagtctgaacgtttcttctgaggagttggacataaagaatggggatatcatagcgattactaccaatataaaagggctggatgtggtgcatacaggatttgcctgttgggtggatggtaaattgcatttgcttcatgcttcatcggtcatgaagaaagttattctagattctcagactctctttgaatactctaaaaataagaaagcccacacgggggtgcgggttatttctttttcttctttgaaaccgtagaggacgtatcttgtttgggcggaaatgtagggacgcatttcataagataaagtatcttcttttgtcttttaagcatgtagttgccaggtctgcttgaattgaatttgcgaggattgggaaggctggctgcaattagtgcgcattcttccggtgtcagtttgctggcattcttgtgaaagtgttcacgagctactgcttcggcaccatagataccatttcccatttctatagagttcagatagacttccataatccgttccttattccaaaatagttctatcaaggtggtgaaatacacttcaagtcctttcctgatccaagaagaagcaggccacaagaaaatgtttttggctgtctgttggctgatagtactggcacctcgagggcgttttcggttcttgttttcttttaaggctttctctatttctttgaagtcaaaaccattatgctcggcaaagcgattgtcttcagaggcaataacagccatagacagatgaggggatatgttttctttaggtagccaagagtgtttccactttatatcttctccatgaatgatttgctgggtagtacggataaacatcaacggggtaaagtaaaccggaataaatcgtaaaacgataactgcgagaatggaagaaccaaagaaaaaaagcagcagattgcggatgaattttaaaatcttttttttcatgcttgtgtattaaaagcaatttcgggcagaaataacctgtccgaaattggtttattttatatgttattccaatgttgtgaccgttggttcgggcgtattggatacgctctacaataacgtcattgatatcatttcagtgttcctgcttccgcttgctgaatcatctgttggctggcatacatatatacttctacacgacggttctgctggcgtccctcggctgtgtcattattacctatcggatctgcttgacccaagccttctacggacttgatctgggaattacttacaccgcaacccaacagataactagccacactttgagcgcgttcttgtgacagattgaggtttttttggatactttgttcagctgtactgtttctccagccctggttgtctgtatatccataaatggatacatccatatctctgttctggttcaatacgttgtttgcaaacttgctcaaggctgatttcgcttgtgcactcaaggctgcatttcctgtattgaagagaataccggaatcaaaagtaacttttacagcctgaaggccattgttatctgttacttgttctacctgtgctccttggatttgagcagcttcttctgctgctttatccatttttttcccaattaacacaccggcacctgtacctactgccgcacctactgccgcaccaatagccgcacctttaccatgtccggctattccgccgataattgctcccaatgctgcaccgccgccgccgccgatcagaccgcctttagcggtattattcatgttaccacatccactgaatactaatgtagcactcagtaataaagccataattttagtctttttcataatcatgttcattttaatatattaatgacttaatgcaaaaattgttcattaaacggcctgataatttaaagctttcttcttgataagcataaaccagatcagacaaataattcctttcatagtgctagtgatgcttatgctccaccaaatacccggcaaaccccagccccatgatacaaacaacagtgccatcgggatgcgcagatagttacaggtgacgctgattacggcaggaggcatggtgcgccccattccataaaatacgccctgtatggtaatttccagcatcataaatagttgcgagtatccgtcaatacgtagaaagacaccaccggtttcgtaagctgctttttcaggaacaaagatagaaaatatttcgtttccataacatataaaaaggaatgtgcagaaagatccgaatataaatgtcatccataaagtggtgcgataggctttcagcacacgggagatttgccgcgctgcataattctgagctacaaaggcactgagagctgtagaaaagccttgggaggtgttccaggtgatagcttcgatttgtcctccggtggtgagtgccatcagccctaaatgaccaccttgttctgtggcggttcttccgagaaacatattgacgaaagcgaataatgtattgagtgccgctaccggtaatcctattttcaaaatgtgacgtgtatattgttttttcagtttagtaaataaccgaaaatcatcccataatattttcttttgtttcaattgatagataaacagtatgcataccgtagcttcggccagccaagtggcaattgctgctcccgtagttccccagcttaaaccaaagataaagataggatccagtattatatttgtaatcagtccgataccgttaatggaaaaaggtattttgcttcgtccggcggcattgaatatccctgtaaaggcagctgataaaaagacgaatggaaaggcggttgctataatccgtagatattccacagccatcttggctatatgaggttctagttcatagatactgataataggggtggcaaagataaataacaatgctccccagctcaatgatataagtaaggacaaggtaagattatgtgatgcgaacgcacgggcagcttgctcgttttgtgccccgatggcttgtcctacgctgacttccgaacctactttgttcagaagagagatagatgtggacatccatgtaagaattcctaccgaacctacggcggctattgcctcacttcctattcttcctacccaagccatgtcggtcagactatatgccatttgtatgaatgaagtagccataatgggcattgccaaagtaaacaattgctttaggatagggccttgagtcagattcttagttcctttcattcgtcattaacggataaattgtctgcaaaggtagaaatttatactgatttctgtggggaatgctgataaaaatacttttctattactctttttaaatggtctggatgttttataaaaaactttgaagttcttgaagaaggataaagctttttcaaaaactccaaagtcttttatgagtatattgatagaagtcgttgattagtaagcgaaaataggatatttcttcattgtttcgtttacgcgtgcacgaacttgtgcgattacttcttcattgtctacgtttgaaagaactgtctcaatcatttcggcgatttccaacatcaagtcttcttttgctccgcgagttgtgatagcgggagttcccaaacggatacctgaagtttggaaagcagaacggctgtcaaatgggaccatgttcttgtttacagtgatatcagcagcaaccaatgctttttctgctactttgcctgtcagatcagggtatttggtacgcaggtctaccagcatggagtggttgtctgtaccaccggaaacgatcgtaaagccacggtcaatcaaagcctgtgccaatacggctgcattcttttttacttgtgtttgatattctttgtattccggctgtaaacattcaccgaatgcaacagctttggctgcgatgacatgttccaacgggccaccttgtataccagggaatacagcagaatccaaaagttgtgacatcatcttgatttcaccttttggagttttcttgccccatgggttagggaagtctttacccatcatgatgacaccgccacgagggccacgaagggttttatgggttgttgaagtgacgatatgagcatatttaaccgggttgtccaacagtccggcagcaatcagtccggcagggtgggccatatcgatcatcaggatggctcccactttatctgcgatttcacgcatacgtttgtagtcccactcgcgagaatatgcagaaccgccaccgataatcattttgggtttttcacgtaatgcgatttcttccatctgatcgtaatctacacgacctgtttctttgttcaggttgtattcacacggagtataaataattccggatgtgttaaccaatgaaccatgtgacaagtgaccaccatgggccaaatttaatcccataaatttatcacccggattcaaaacggccaaaaatacagcagcattagcctgtgctccggagtgaggttgtacattagcccattctgctccaaatatttgtttcagtctgtcgatagcgatttgttcgctctggtctaccacttcgcaaccgccatagtagcgcttgccgggatacccttcagcatacttgttggtaaggcaagaacccatggcttgcattacttggtcactaacaaagttttcggatgcgatcagctcgatacctttgagctggcgttgatgctctttttcgataatgtcgaaaatcaaatcgtctcttttcatttctttttataataagtttatgtgcgatattcgattctgagttcacaaagttaagtaattttagaatataaggaaattatttagaggaaaatatttggtgaggttacggaaaaaagatatatgactttctttttgtcgtgtagtaaggtctgaagctgctgaaagagttgaagataagggcgttttgaggaaagaaaaggatataaatgtggcattatgatatctacttagaggaagcttcctactttagaaaataactcctagcgagaagcttagcacattgcggtgtcggttaatgaagatacctttttcttgggacattattccatctgtgtctttttcataaatgattgatttagagatattggtgagtccgatttcataccggaaatcaaagaatatattagcaatatttactcctaatccgataacagaacttatattaatggggtgtaattcttcttttataccagaatatccaaatccttcaaactcttcggaagtcttatgtttccatacatattccagtttgggaccaataaaaagtgccatgccgtaaggcctgctttttacaaaactataaccatataatataggtagctccaaagagtgaatcgtgctgttcagtttagcaagctcgggaagggtgttttctttattttgatttttattgaaagctatttcacctttataaatattatacataatttcgggttggatgaaatgccttttcatgtgcacccgaaaaaacatggcggcaaaatagcctactttataattattttgtacatcttccattcgttctccatctagttctaaccgactggtaaaatacatggaagagttgaaacctccttttattcccacattgatcttaggttcctctttcagaccattctttattccttgtgctgtaacgaacagggcaggaagtaataaagcgattaataaaaggagtttcttcatgagatatttttaggatttttccttggtctgtgatctgttcttttctacagaccagccaaacttcccgattttcggtcctagttcaaaatatccgccatgaacatagactaacgggttagcttcggataattcgaattttcctgtttccgcattcaggtatttatcgtcggcttttacatttaccacatcggctatgaacatatcatgagatcctagtgagatgatttcctttactctgcattctatacagagcggggattcttcgatgatgggagcactgactatttttgcttttcccggggtcagcttcatttcttcaaatttattataatctttgcccgaacgcactccgcaccagtcggtagcgaatgccatgcttttggtagtaaggttgatgacgaattccatattccgttttagaatggggtaggaatggcgttccggacgcacggatatataacacatggcggggttggtacaaatagtacctgcccatgccactgtgataatgttatattcttcttccgtacttccgcaacttaccagtagggccggaagagggtaaatcatagttcccggtttccagtcttgtttcatattcattacagtagtttgataccttctttactttgttccttttcgcagtaatgacatttcaagattccatgttctttgtcaattacatgaaacagggtggtcattggctcattgttggtgatacatttgggattggcgcactttacgatgccacgtaattcctcaggcatcaggacttgtttcttctctaccacctcatagtcacggataatgttcagttttacattcggggctactacggaaaggcggcttatttcctcatcagtaaaaaagcggtcggccacttttataattccttttttacctaattttttgctctcgaagttgtttccgatggttatgttagagtcagaatcctgcaagcccaatagggcgactacagtaaacaatttatcggaaggtatatggtctataacagtgccgtttttcaaagcggctacctgcaatgcttgtttattatcgctcatcttcatttttgtttttacttttttgcatcttctataacatcattcaaggttatgcccaatacatcacaaaggatggcctggcgcgcataaagtccgttttgtgcctgctggaaatagtaagctttcggattctcatccacatcgtaagctatttcgttgacgcggggcagagggtgcaggatacgcagattggggcgggtatgctccagcatcttattccttaatatatatacatctttcacacgttcatattccatcaggtcggtgaaacgttcgcgttgtacacgggtcatgtaaagaatgtcggcgtcagcaatggtttcttcgttaaagtctgtgtactctttgtatttaatatggtgctccttgcagtagattttatattcttcaggcattttcaactcttccggagcgatgaaatggaaagtggggttgaaatgacgcatagccatcagcaaagaatgaacagttcgtccgtatttcaagtcgcctactagatagatgtttaaattttcaagcgttccctgtgttttgtatatggagtagaggtctagcatggtttgtgacggatgttggttggctccgtctccggcattgacaatgggcaccggggcgacttcgctggcatatcttgcggcaccttccagaaaatggcgcattacgatgatgtcagcgtaattgcttaccatcatgatggtatctttcaatgtttctccttttgaagaactggttactttgggatcggtaaatccgataacgcgggctcccagtctgtttgctgcggtttcaaaactgagtcgtgtacgggtggagggctcaaagaaaagggtggcaacaactttgccgtccaagattttacggttaggcttcttttcaaactcttttgccatctccaaaaggtagaggattttctctttcgagtgttcggcaatagtaactaaacttctattttccatattggcttgtatttataattacaatttatacggagtgtaaaggtatgaaaaaaaaataaatgagcgaagaattaaaagatatttcgttgaactttgttagaaacacattctatctcaaagtttttccttacttttgtaccgttaattactagaaaatgtcatgaggaagaaatttatatacgtgctttgggctcttgtagtcggcgtactgttagttatagcgcttatattcaccgcaatagcgaaaggatggattggatatgtaccgcctattgaggaattggaaaatccgaatttaaagtttgcaaccgagattatatccgatgacggcaagatgctgggtacttggtcacttagtaaggagaatcgtgtttttgtaggttatgaccagctttcatcgaatctgattcgtgcgctgattgctaccgaagatgaacgttttgcagaacattccggcattgatgcccgtgcgtttgtccgtgctttggtgaaacggggagtgatgatgcagaagaatgccggtgggggtagtaccataacccagcagttggcaaaacaattctattcacctacggcagataatgtgatggaacgtctgttgcagaagcccattgaatgggtaatagctgttcagttggaacgctattatacaaaggaagagattctgactatgtatcttaataagttcgatttcttgaataatgcagtaggtatcaaaacagctgccaatacttacttctcgaaagaaccgaaagatttgagcattgaggaagcggctactttggttggtatgtgtaagaatccgtctctttataatccgaaacgttttaatgaacgttcacgtggacggcgtaatgtggtgcttggccagatgcggaaggcgggatacctgactgatgcggaaactgattcattaaaggcgttgcctctcgtcttaaaatatcgtcgtgtggatcataaagaaggtttggcaacttacttccgtgaatatctgcgtggagtaatgacagccaaggagccgaagaaaagtgattatcgcggatggcagatgcagaaatattatgaagattcattggcatggaaaacgaatccgcttttcgggtggtgtgctaaaaacaagaagaaagacggtaccaactacaatatttatacagacggtcttaagatctataccactattgattcacgcatgcagaaatatgcggaagaggctgtttatgaacatgtggcgcaatacttgcaacctcgtttcttcaaggaaaaacggaaaaagaaaacagctccgtttactaatcagttgacagaggaggaggtgaataccatcatgaccagggctatgaaacagactgatcgttatcgtattatgaaagaagccggatgctcggaagcggaaataaagaaagcgtttaatactaaatacgaaatgtctgtattttcttacgagggagagaaggataccattatgactccgatggattctttgaaatattataaattcttccttagggcgggatttatgtctatggatcccttgacaggtcatgtgaaggcgtatgtgggtggtcctaactataattatttccaatatgatatggcgatggtggggcgtcgccaagtaggttctactattaaaccttacgtgtatactttggctatggagaacggtttctctccctgtgatcaggtgcgtcacgtagagcagacattgatagatgagaacgggcgtccatggtcaccacgtaatgccagcaaaaagcgttatggagaaatggtaactatcaaatggggattggctaattcggataattgggtaacggcttatttgatggggaaacttaatccttatcagttggttcgtctgattcattcattcggtgtgcagaacaaacagatagaccccgtagtatcactctgtctgggaccttgtgaaatttctgtaggggagatggtcagcgcttattcagcattcgcaaaccgaggtatccgtacagcaccagtatttgtaacccgtattgaggataatgaaggtaatgtattagcgaatttcactccgcaaatggatgaggtgattagtgagaccagtgcttacaaaatgctggttatgttgcgtgcggtcgttaatgagggtaccggtggacgtgtacgccgtctgtatggcattactgctgatatgggggggaagacaggtacaaccaaccgtaactctgacggttggtttatgggattcactccctcattggtgtccggtgtatgggtaggcggtgaagaacgtgatattcattttgatacgatggtagacgggcagggggctgctatggcgcttcctatttggggactttatatgcagaaagtctataaagacaagagcttgggatattctcaggatgagaaattcaatattcctgatgactttgacccttgcaaagataccttaatagatgaaacttcggtagaagaaaccggaggtttggataatatatttgaataattgaaagatttatcaataaaaaagtctgtttgcaaggaaaagcaaacagactttttttattgatataccttttataaaaggtgctttctctacttggtgttgtggaaaataatttatgtaaaaatagtgaaaacccttgctgtttcgtaagaaaatactatatttacaaaaagaaaatctttaccttatgaagataggaggtaattatggatagagatgtaactctgtatcagataactaatgttatggccgagagagttttccaaaaaatagataacttcaataaaggccgtagagaagatgcgggatattatgcaatcagtgtttctaccccttaccgatcatattatgcattatggcgtatatttccggacaatatttattcccctttgtttattcaatcgctggctgtcacttttaatgatgcggcagaacgtgcttttcagtatttgcagaactgtaacgtcctgctgaaagtaaaagacaatactttttttgaaccttattatggaatatccgaggatatagtcgcatttggaaaatatcgtggaaaaagattagcggaggtttattacattgatcctaactatgtactttggctggcacacaaatttgaggcccgaaatcctagggataagaagctggcaatgttagcgaaggcttttgctactgtgcattatgaaacggttatcagaaaacatcatttgccggctggcagtcgttttatcggtcagccgggagaaaaactatccgacttgcgtttagaagtcttagggataaggttacaactggacatatacaaaacaaccggatattatgtggaccagagtgtgcttgccgctgatgctgatggcaaccgttatactttcattataaaggcggcggcttccagtatgtcaccggatatgttgagctgttatacaaaaaaaatcaatgtccatgaaagtttgtatttaaaatcggctaaagttctttctcattatgagaacaaaggaataaaatatactcgcataggatatttgaagttcaaatagagaccgggcgaggtgggaaaagtacttgtcttcattcatgaagataagggcaggtggcaagatattatatgtttttattctattaagttgggaaaaacttttagtgttctgaattttcttggtgacataccggttattcgtttaaagaaacgggtgaatgaggacggagtagaaaaattcagtttatagcaaatctcctgaatggtaaggttggaagaaatcagtagggcttttgcttcaataattacataattgtcaatccagtttcctgccagttctccgctaacatcccggattatggaagataaatacttaggggttagacaaagtttctcagcataaaaagaaatgtctctttctttataatgatgggtttctaccagttttaaaaactgtttgaatatgtcttctttatgcggcagttttttcttttttatttccagatgctttagtaggagctggcatacttcgtagaaagtagcttgtatcagatattgtatggtaaaatcacgaaacagattattttcttcactgatttttttgtaaagcaatacatgatatgttttcaataaatctgtttccgcgatattcaaattgacacatggatgattttttagaggaattaaaagagacatcattttataaaaattatctcgggtatcaaaatatttattagatatcatgatgagatgtgctttgtaatcctcgcttatttcattatatttaattatttgattaggcaccatcattagtaatgtattctctttagtagaatagttgatggagtctatttctatttcagaagttccggaaaggcacagtataaatgaagtataggttgttttatatgaattgttgtgaaagaaaggatgggcaagagtcttgcgggtaagatcttttcccgtattattataaataatgaaatcatcggaaaaataatctgcgttaatgaaaaagccggtattccagatgtctatgtcggtatgtccttttatcattcttgatgttatttaaagtaaaagaataaatttaattggaatgaaacaacaccattcgactatttgctaataataagcgacattcagaaaattattagttctgtgttatggttgtaaaaagccttccctcatggcgagagaaggctttttattatccgttaacctttttgtaatcggccaggaacttttctaatcctatatctgtcaatggatggtttagaaggcctttaatggcggataacgagcaggttactacatctgctcccacttccgcacattgtaatatatgtaaggtgtttcggatggaggcggcaagaacttgtgtcttgtagtcataagtttggtacaattctacaatttgtgcaaccagtcctacaccgtcattgcaaatatcatccagtctgccgacaaacggagatacataggtagcccccgcctttgccgcaagtaatgcctgtccggcagagaaaaccagtgtacaattggtacggattcctttattactgaaatatttgatagctttgatgccgtcctcaatacaaggaacttttactacaatgtgtggattaagggctgccagttcttcaccctctttgatcattccttcgtaattggtggcaatgacttcggcgctgacatctccatccacaatattacatatctcgatgtaatgcttatgttggttctcaactcccttaataccttctttagccattaaagagggattagtagttacaccgtccagtacgcccaatgcgtttgcttcgcgaatttgttccagattagctgtgtcaataaagaatttcataactttttcttttagataattaaaatcaggttagcaataggctgctaagctactgatattaacaatgataaacaagaaaatgttccgatttatctgttatgagttctttttataactgaacacggcccaaccgttcaacatgatagccataaaaagcaaggcaataaattgcatgatcaagtcatcgaatccgcttcctttcaaatagaccatacgtgtcacttgtataaaatatttcaagggattggctatggtgatggcttgagcccactcgggcatactgttgatgggggtgaataatccgctcatcagcatgatgataatcacaaagaaaaacatgacaaacatggcctgctgcatggttcgggaatagttggaaactaccagtcccatacccgaaatgacgataatgaacagcaatgcgaagaaataaagcagccataaatgaccggccggaaccagaccatagactaaccatgccagaatgatactgattgtgaggatcagcatgccggttacccagtaaggaatcagcttggccagaatgaaagtgaacttgcttacaggagtcacattgatttgttcgatggttccgaattctttttcactcacaatattaagagcaggcagaaagccgcataacatcatcaacaattgcgccatcagtgccggaaccataaataccttataatccagataggggttgaaacgtccttgggtatctatttttatcactggggagggagaaatagagccggaatgggaaatccggatttcagtggcataggcattcactatattactgaggtaggaacttcccaacgttcctttcgttccgtttacggtgttggctgaaaccagtacttttgctacaccggttttcagcaaatcgcgttcaaagtgtggcgggatttccaaaatgaggtcggcatctcctttttcaatgcattgcattgcttcctgatagttgtttgatacatctatcagatgaaaatattcggaagctcccactttctgtactaatcgggtagaataggggctgcggtcattatccactatgctgagattcatatttttgatttcgaagtttgcggcccaaggcaacaccagcaggataatacagggaaatacgagtagcatccgcggaagcatcgggttgcgcagtaactgcttgaattctttttctaataaatactttatcatatcttccggaacttattctaatcgtttgttaaacttttttaggctgatgattaaaaggacaacagccatcagcataagtatacccatttctctctgtgcataactgatacccaatccttcaatcatgattttcttgattccgacaatataccatctggcagggatgacatttgaaatcagctgtaaaggaagaggcatattctcgatggggaatatcatgccggaaagtagaacggtaggcatcatcagtaccattcccgaaaacagcatggcttccacttgggtacgggcgatagtggaaaccaataatcccaacagcagagatactacgatgaagatccatgagagcaaagccaacgaaaaaagactgcctgctaccggaacatgtaatacataaacagacagcaacagaattgtaaccagattgacgcatgacagcacaaagtaaggtaccattttggctataatcatccatagcggacgtacgggagataccagcaatacttccatcgtaccggtttctttttcgcggacaatagagatggaagtcatcatggcgcatatcaacattaaaatcaatcccattactcccggcacaaaattgtaggcgctttgcatacccggattgtacaataactttatttgggggataatctgtatgggtgattgttgttgcatgatccggctttgctgataatctgcaataatattggatgcgtaagaggtcagtatggtagcattgttgggatcggtggcatcggctatcagttgtactcgggctttaccggtatgccgcagattgttatcgaaaccagcctcaaacacaatgatcaggtccgaactgcttttccggagtgtttcctctatctcgttgttgtcatacagtatcttgttgacattgaaatagtcactggcatccagtttgtcgatgatttgccgggtggatacatcttttgagaaatccagcacagctacttttacattctttacttcggtggtgatggcaaaaccgaaaagaataatttgtacgacaggcatacctaataatatcagcatcgtccggaggtcccggaaaatgtgatagaattcttttcgcacgaatgatataaattgcttcattctcttttttctttatctttttttcaacttcttacagccttgcgtgccaactgtctgaatacttcatccatatcttgggcatgaaaccgttcttttaaccgttgtggggtgtccagtgcttcgatttttccatccaccatcattgaaatccggttacagtattccgcttcatccatatagtgggtggtaacgaagacggtgattccccgttctgccgcctgataaatcaattcccagaactgacggcgtgtggcagggtctacccctcctgtcggttcatccagaaaaacgatcttcggctcatggaaaatagctaccgagaaagccagcttttgtttccatcccaggggaagtgaccggaccaatgtgtttttctcattcaagagccctaattgttccagcaccttgtctgttttttcagcgatctccttgtcactcattccataaatccctgcatatagccggatgttctcccatacttttaaatcttcatacagtgagaacttctggctcatatatccgatcttctttttaacctgctcgtattgcgtggctatgtcaaagcccgctactgtaccttttcccccggtaggttgtgataaaccgcataacatgcgcatggctgttgtttttccggcaccattagcacctaggaaaccaaaaatctctccctgtctcactttgaatgagatatggtccactgccgtgaaattgccgaattgtttggtcaagccttctacttctatggcgtatcgcccggtgacttgcggctcattaaaagagagcccttcaggagaaaggatcgaactgaactgttgaagaatacggtccggagtgtcaatgccttgaatctttccttcacggataaatgcaatacggtcacagcatttcatctcgttcaggtaaggtgttgccgcaatgatggtaagaccttcttgtttcaatttcagcagcatgtcccaaaactcctttctggatacagggtccacaccggtggtaggttcgtccaagaacagtatggaaggcctgtgaatcaatgcgcaactcagagccagcttttgtttcatgccgccggatagttttccggcacgccggtgtttgaaaggttctatttgttggtagataccctttaccaatgcgtagttctcccggatagtggtattgaaaagcgtggcaaagaaagtgagattctcttctacggacaaatcctggtataaggaaaaacgtcccggcatatatcctgcctgccggcgtatctctttgtaattcttcaccacatcctgcccgcagacttccgcttttccttcatcggctagcaccaatgtggtgagaatgcggaaaagagtagtctttcctgcaccgtccggtccgataagcccgaagatttctcccggtttcacctcaaagcatacatctttcagggcttgaacttcaccgtagcttttgctaactcctttgacagaaacgatataatccattgtcttatttatttcttcatttctccgtacatgcctatcttgatgtatccgtcattctttactgctatctttgtggcgtataccagattggcgcgttcgtcacgtgtctggattgttttaggggtgaattccgatttgtctgaaatccaggtgattgtcccttcgtattcccggcggtcatctttccctaaatcagaaaacacttttactttatctcctaatttcagttgggataattgatcggcggtgatataggcgcgtaaaaaaagatgttgtacatccgccactttaaataaaggttttccttgcgtggccagttccccggcttcggcatatttggccagtactgttccgcaaatcggactggtaatgtgacatttgcgaagctggtcatccagttgggctacttgtatttcgtaggccgagctttcttctgtgatactggcattgccgcgctgaagcgtagagatctgtgcttccaactgttttttcagaacggcaatctgggagtcaatatcatctatttgtttttgggtggcggcattttccttcagcaagttttctgtgcgttttctttcatattcggctttgccgatttgttcttttgtggcagctatctgtttattgatgtccgtgcttttgctggctatcgctttaccgctggccagtaactgcatctttttcaaatagagttgtaaggtatctatgcaccccacttcttccccggcctttaataactgtccttcttctatgttgaattgcatgatcttgccattggcttcggaggatacaattacttcggtagcttcaaatgtacctgatgcatcatagtcgcctctcttgtttccgcaagaggataaaccgagcagagtggcggcaagtaagatatatttatttgttctcatattggtttgttgtatattttaattcgtaaatggctgacaataactgaatttcatgcaggattttatcctgcatggcaatgttctcggctgttacttcacgtaacatttctgtaacggtcagtgttccgttggcaacttttgcttgggctgatttttttatgttgttacgtagggtgataatctcctcatcgttcttcatcagttccgtcagtttcttaatttcactgttgttttgagtgatttccagatgagtgttaaacaagaacgtttctttctgtacgttcacatcctgttgattcagtattaattggcgagattcattcttacgagtatataggttgccgaagttccaggaaaggcgtacgcctgctacgtaataggccgaaaattcatttttcagcatattcagtcccgggttgccgtatgcgccttgcacgaataagtctaatcgggggaggttcttggcggtaagttgtttacgttgcgcctccagttgctggttctgtaccgcaaacaagttaagttccggacgtcggatgaattctgtagaataggcttctcctttatataataaggcatttacatctggtttctttagtgtgttttcggttaaaggagtagggtggttaatcatgatcttcaacatctcgccgtaagcacgataggtggcttccagagtatgacgttgctgtatgttgttcaattgttccacttttacagcatccaaatcggcttgattggcaatgccattctttacatatgctgcaacattgtcataattcctttgtaattcttcctgcataagctggttttgcttcaattgctctttcaataacaggatgccaaaaaaaagttggtttacccgttcgttgatggcatacatgtccacttccagtttctgtttgtctacttcggatgtggcacgggttacctctttccgtgcccggatgttaccaccgtcccataccacttggtccagttgcaacatagcttggtattgatccttgcgtatgccgcgaatatcaattccgggcaggtcaacgggtatttccgttacatccgattgataactggctttagcggacaatgaaacctgtggcagataacccttgccggcgttagagatgttgtattctttcgtcttttcaatcagtccgtaccgtttaatcagcggataatgcgcctgggcttgctgctgacactcttccagcgtgagttcctgtgcattcaaacaaatgggactgatgccgagaagaaaggttgtgagaatgaataaccttttcatattcttaatctgcttaatatgatttctacattttcttgttttctgcgttccatatattgatgatattcttcacctttttcttctacaaacaattgtatcagtgggtttgccacaaagacaaagatattgagtgaaatggcgctgaccattaaatcttccgccttgacggggcgtattgtgcccttctttatttcctcttgcagtgaccggtcgagcagactgattgctaaccggaaattagggaacaaggttttacggcaaatttcttttccgcattcattggtcagaatctccctgtatataaataaaggtagttcgggattagcagtcaaaaggtcgaagtgtgcttcaatgaaacattttattttctccaaaaaaggcagtgactcatctacacgagaaagaaatgtatcggccagttgcctggctttttcttcaaatactttgttgaacagattctcttttgtacggaaataataatgcagcatggcatgggttacaccagcctccttagctatttctgttgttttgcttccggagaatcctttcttaaggaattctttttcagcagcttttaatatggattgttctgtattgctcgtttcttctttcatattatcatttttgtttaacaggattgttagtaaacgcaaatgtataaggaatcattggaaacaacaaacagatgagataaaaaaatgtgctttctgttcttatgaaatgtttttttcaaggaaagctaatctcttttttgaggcaggttaaggcttttctttctgttgtgttctatctccataggctttggagttaactccaaaggctgcggagataactccaaaggttatggagataactccaaagcctatggagatagaaatagaacggccggaaagccttagccttcttggtagaaagccttaggtctgccaatgaaaatacttagctgttttcccacctgtcaggttgggcctctcagtaacactatcgtttgccatagggggggatggaggcggggtatcacaaggtgataatgattagtatataataaggtataagctctaaaagagcacagacattccacggcggatatattctctttccatatcttccggtttcaatatcttattgtcaaagaccagcaagtcaatatccagttttaccaccccttgagccttgtcttcgggaatccgtccgctgcgtcgttccaattctttaaacaaatcacgaacggaatcgggtgaaagcgtagtgctgaattttgccagttgattgctgaaaggggagtgaaagccgctgccaacagcttccgtttccatcatctcgccgaaatgaatgtcgggaaacgtggtgcgcaatgcttcccgtgcaaccgagagttgcgcgtaacggttggtattagagcccatacaaagcaaacaatggtgttcgtccataacatttattgcattaatggtgcaaatgtatgaaatgtttttgttacttttgcatgaatatataaaagaaatgctaccatgaaatttattggaattattcctgcaagatatgcctctacacgttttcctgccaaacctctggccgtcttgggaggcaagcctgtgattcagagagtctatgaacaagtgtccggcatattggatgaaacatatgtagcgacggacgatgaacgcattgaatccgccgtaaaagcttttggcggaaaagtggtcatgacctccgttcaccataaaagcggcacagaccgttgctatgaagcgtataccaaagtaggacgaggatatgatgtggttgtaaatatccagggtgatgaaccttttattcaaaaatcacagcttgaagccgtgaaagcttgctttgaagatcctgccacacagattgcgactttggtgaaacctttcatcccggatgacgggcttgaagccttggaaaatgtaaactctcccaaagtagtagtcggtaagaatatgaatgctttgtatttcagccgttccatcattcctttccagcgtaatgtggagaaggaaggctggctgaaagggcatacttactataaacatatcggtctgtatgcttatcgggccgatgtactgaaagaaataacttcgcttccacaatcttcgctggagctggctgaatcgttggagcagcttcgttggctggaaaatggttatactattaaggtgggaatcagtgaagtggagacaataggcattgatacgcctcaggatctggcacgtgccgaagcatttttaaaacaaagggagggggagtaaatgctggacagaaccaccccaccgccaatccgccaactaagcgaattcagtataacccgtcccgacaggaggacgatgaagaacgggatgcctttgaatatcattcatgcgggaaccgaggatgttgtacgtttcgatcttctgataggaggcggacaatggaatcaggaacagccgttgcaggctatgtttgccaacaggatgctgcgtgagggagctgggaatttaacgtcttcacagattgcggagcgattggattattatggagcctggctggagttatcttcttccgtgaactatggattcataacactttactctctgaataaatattttgcccgcacgctggccgtcatatccgagatgataaaggctcctacgtttccggcaaaggaactttccgtggtggccgatacgaacaaacagcaattcctggtgaacagcacccgggtggaaatgattgcccgaaagcagctgaatacagccttgttcggtccggagcatcccttcgggcgctatgcggtagcggaggattatgaccggattaccccggaggtgctccgttcgttttatcggaaatattatcattcgggcaattgttcggtatatatttcgggaaaggtcacatcggaaattatccgttgtatagaagataacttgggaagtggacaatggggggaagtgacggaaaaagcaaagacaatgcttgttcctccggttaccaccaaagaaaagcgtatctttatagaacgtgaggatgcacttcaaagttccttgaaaatgggatgtttcgtaatggaccgtcatcatccggactttttgaaggcacgtgtcatggtcactttgttcggagggtatttcgggagccgtctgatgtccaatatccgtgaagacaagggatatacatacggtatcggcgcaggcattgtgtcctatccggaaacgggaatactgactgtcagtaccgaggcggccaatgaatatgtggattctatcataacagaagtttatcgggagatggacaaattgtgtaatgatctcgttcctcaagaagaattggaaatggtgaagaactatatgctgggcgatttatgccggtcgtacgagggacctttttctttgtctgatgcctggatttatatagaaacggcagggctggacgaacgcttctttatccgttcgctggatgccatccggggaatcaccagagaagaaatacgcatattggctcaaaagtatttctgcaaagaaaacttaatagaggtcattgcgggtaaaaaagtgtaataacctatcatgtccaaagatagaaaatcgtatctttggcataaatcttatctattataagtaacgaaccaatgaagaaatacgtatatatattattgcttttggcatcggtcagtacattggccaccgctcagataaaaatcgggaattatacttttaaagacgggggcgaatataccggagaactgaaaggcagaaaaccaaacggtaaaggaaaaacaatctacaagaacggaaatacctacgaaggggaatatataaaaggtaaacgcgaggggaacgggacatatacgtttcacgatggagaaaagtatgtggggcaatggttccaggaccagcaacacggcagcggaacctattattttatgaataacaaccggtatgagggtatgtggtttaccgattatcagcagggtgaaggcactatgtattattataacggagatgtttatataggtaactggtttcaggacaaacgtagcggaaagggtacttatacctggaaagcaggagccaaatatgagggcgaatggaaagaagacaagaaaaacggacagggtgttatggtatggcccgaccagtcaaaatatgaaggcgagtggaaagatgacgcacgtgacggaaaggggacgttttactatgtcaacggtgacaagtatgtgggtgactggaaggatgacgtgcagcatggtaaaggcatttattactttcatagcggtgaccgttacgaaggtgactacgtgaacggtgaacgtaccgggcagggtatttatatacacaagaatggtgacaagtatgtagggcagttcaagaacggcgagcagcatgggaccggaacctttacatgggccaacggtgctgtgtatgaagggcagtgggtgaataaccagcgcagcggtaaaggacactatatctgggcgaacggcgatgactatgaaggtgaatggaaaaacaacatggccgacggtgaaggcactttgcgcacggctgacggaaccaaatacaaggggcatttcgtaaaaggaaaggaagacggcaaaggtgtgcttgaagataaaaacggagtacgctatgacggatttttcaaacaagggaagaaacacggcgcttttgtggagactgacaagaatggaaatgtaatccgtaaaggtgtttataagtttggaacgctggatgcggaacaaaaataagaatataatgttggatttagagaagataacgttgaatgtacgtgaaatagcactccgggcgggtgcttttcttcgtaatgagcgtagcggttttgaccgtagcaaggtagagaagaaaaatgctcacgactatgtgtcgtatgtagataaggaatcggaacgccgtattgtggcccaacttcgggaattgcttcccgaagcaggattcattgccgaagaaggttcgggcagcctgactacggaaaactattgctggctggtagatccgctggacggaaccaccaattttatccataataatgctccttattgtgtgagtatcgcccttcgcaataaagaagaactgctggttggggtggtgtatgaggtatgccgcgatgaactttactggacttataaaggagcgccttcttatctgaacaacaaagaaatacatgtgtcagatgtttctgatatggacgaagcgtttgtggcgttaggctttccatacgattcgcaaaagtataagcctttggcggagcatatcgtgcacgagttatatggaaatgtgggaggcatgcgcctgcaaggagctgctgcggcagaactttgctatgtagctgccggtcgctttgaagcccgtatagaagggctgctgggaccgtgggatattgctgccggttcgataatcttgatgaatgccggtggaaaagtgacagattacagcggagggggagacttttattccggtcgtgaagtgttggctactaatggaaagttgcatgatgagtttctcaaggtcttgggaaaaaaataaatacttcgcttttttctagttcgttacaaatatattttgtaagtttgtcaagtgaacacatgaacataatgtaacatggatgtatctgttatctttcaatttttaaaagacctggccgcaaacaataaccgggagtggtttcaggggcataaggatgaatatctgaaagctcaaaaagagtttgaggaattactgacagcaatcatcgcccgcatttcgttgtttgacgaaagtattgtcggtattcaagccaaggactgtacataccgaatttatcgcgacacgcgtttttccagtgataagactccttataagatacacttgggcggctatatcaacgctcgtggaaagaaatcggaacattgtggatattatgttcatatagagcctgataactgtatgcttgctggtggaagctggtgcctggaacctaaagtgctgaaagctgtccgccagtccgtttatgacaacatagacgaatacagggaaattgtggaagatcctgcgttcaagcaatactttcctgttatcggagagaatcacttaaaaacggctcccaaaggatttccgaaagattttgaatatattgattatttaaaatgtaaggattatacctgtgcttatatggtgcctgatgcgtttttccttgcccctgacctgttggacaaagtagaggatgttttcaagcaactgaagcgttttgctgattttacaaatttcacaatagacgactttgaatgataaaagcaatattttaaccattaaaatgaaataattatggtagtagacagattagaaaacttagaaaagtacgcttcattgaatcctttgttcgctaaagcaatggaatatctgaagactacagacttgaacgctcaggaattaggaaaagtaaaattacagggtgatgatctggtagtaaacttttctcagaccaagcctaaaactaaagaagaagcaaaattagaaactcataatcagtttattgatatacagattcctctgtcaggggtggaagtgatgggttatacggcccgtgaagatcttcccgaagcagactatgatgcagataaggatatctcgttctatccgggacttgccgaaagctatattcctgtaaagccgggaatgtttgccatcttttttccacaggatgctcacgctccgggagtgtctcctgacggtgtgaaaaaagtgatcgttaaagttttggtttgaaagagaataactaacaagtaatcatattatggaaaataccactcctaaattaggcataatagaaagtgatccttggctggaaccgtattcggcagcgattgaaggacgccatcagcatgcactagacaaagaattggaactgaccggaggcaaaggaactttatcggactttgccaccggatatttatatttcggcttgcatcgtaccagaagagggtgggtgttccgtgaatgggctccgaatgcgaaggaaatttatcttatcggagatttcaacgactggaaagaacatggcgattataggatgtaccatgtaaagaactctcctggtgtatgggaggtggaattacaaagcggtgctataaagcatggtgatttgtataaactgaaagtccgttggaatggcggtgaaggagaacgcataccggcatgggccaaccgtgtggtacaggatgagcagacaaagatattcagtgcacaggtctgggaaccggagaatccttaccggttcagaaagaaggtgttccgtgcaaagactgatcctttgatgatttatgaatgtcatatcggtatggctcaggaagaagaaagggtagggacttataatgagttccgtgagaaaatattgccgcgtatagcggaagccggatataactgtattcagattatggctattcaggagcatccttattatgggagtttcgggtatcatgtttccagtttctttgctccgtcatcccgtttcggtacaccggatgaattgaaggaattgattgatacggcacatagaatgggaattgccgtcattatggatattgttcactctcatgccgtgaagaatgaagtggagggacttggcaattttgccggtgatcctaatcaatacttctatccgggcgggcggcgtgaacatccggcatgggattccttatgctttgattatggtaagaatgaggtgattcatttcttgctgtccaattgtaagtattggatggatgagttccgttttgacggttttcgttttgacggtgtgacatcgatgttgtattatagccacggcttgggagaggcgttctgtaattatggggattactttaacgggaatcaggatgataatgcgatttgttatttgacattggccaacaagttgattcatcaggtaaattccaaagcgattaccattgcggaagaagtttcgggtatgcccgggttggcagcaccgattcaagatggtggatatgggtttgattaccgtatggccatgaatattccggattattggattaaaacaatcaaggagaagattgatgaagactggaaaccgagcagcatgttctgggaagtgaccaacagacgcaaggacgagaagactatttcgtatgccgaaagccatgaccaggcattggtgggcgataagactataattttccgtctgatagatgctgacatgtattggcatttccagaaaggggatgaaaattatacagtgcatcgcggcatcgcattgcataagatgattcgtttgcttactgcctctaccatcaatggaggatatttgaactttatgggtaatgaattcgggcatcccgaatggattgatttcccgcgtgaaggtaacggatggtcgcataaatatgcccgtcgtcagtgggggctttttgataataagaacctgtgttaccattacttgggcgattttgattcagctatggtccacctcattgagagtgtgaaaaatattcaggaaactccagtgattgaagtatggcataacgacggtgaccaagtgttggcttaccggcgtaagaatttgatttttgtatttaatttcaatcctaccaagtcatttacagactatggtttcctagtgcctgtcggggcgtatgatgtggtactgaatacggatgcgacagctttcggaggcaatggtctggctgatgacagtatacgtcatttcactaatttcgaccctctttataagaaggataaaaaggaatggctgaaactgtatctgcctgcccgttcggctgtggtattgaaaaaagtgaaagagtaatttatgagcaacaacaacagcttatcctataaaagagccgcccgcatcctcacggttgcgtgcggtcttcttttctctatttttagtattgtctatctttttgtgcttcagaaagatgtagtaggtgcattgcattattcattgtcacaaggaaagacacattattctccgttggtgggagctattatcattacagtggttttattggtattccgttggggaatcaatggattgatgggattaaaggggcctgtacggacactttcttatttcccgtcttgtctgttgctgggagtgctgacggatgtggaccggactattttccacggaggaaacataggagataaatggttttggctgctgccgttgcttttgcttatatatataggtgtggtctatactttacggcgtgtgtttcgttcctggctgaatcaagaggggtccatattgggcttaataaactctaacttagctattttgacacttttatgcctgatgacggtaggtataggaaatacgaatgtgaattttcatcatgaactggctgtggagcaggctatccgtaatcatcattatgaagctgcacggatggtaggagcaaagtctttggaaacaacccgtacattggcagtgcttagagcctatgctatgtctttggaaggtaccatgggggagcatttgtttgaataccctcaatattatggtgcggaagggcttttgtttgcgcctcattctcaggaaactttgcgcttgaatgccgatagcttgtatgcttatcttggtgcaagaccacatgttgcagaaaagacagtagactttttggctcgtatctgtcgtgatgaaataggtagacataccgctttgaattattatatgagtgcattgctgctggataagaaattggacaaatttgtatcggcggttgatatgtattgtttcgagcaagatacattgccgcgttattatcgtgaggcattggtgctttacaaacggactcatcctggatatggaagagaagtcaaagacacgctgatggtgcggcgtttggatgagtttcttaaccgtcagaaggaattttcatcaccggtggaagagaaaaaccatatgcggcgggaatatggtgatacctattggtggtattatcgttatcaataagttatttttatactttttgatcctatatttttgctaaatcattggtactttcccatgcttttttactaattttgcaaactcttaaaaaggaaaaacaaaaataacgatatagcaatggcagtagaattgaaagaacttaccaaaagaagcgagaattattctcagtggtataatgatttggtggtgaaggccgatttggctgaacaatcacctgtgcgtggatgtatggttatcaagccttacggatacgccatttgggagaaaatgcagcgtcagttggacgatatgtttaaggaaaccggccacgtgaacgcttatttcccgttgcttatcccgaaatcttaccttagccgtgaagctgagcacgtagaaggatttgccaaagagtgtgctgtagttactcactaccgtctgaagaatgcagaggacggttcgggtgttatcgtagatccggctgccaaactggaagaagaattgattatccgccctacatctgagacaatcatttggagtacatataagaactggattaattcctatcgtgacttgcctatcttgtgtaaccaatgggcaaatgttatgcggtgggagatgcgtacccgtttgttcctgcgtactgcggagttcttgtggcaggaaggacatacggctcatgcgacccgcgaggaagcagaagcggaagcacagaaaatgttgcatgtgtatggtgacttcgctgagaagtatatggctgttccggtaatcaaaggggtaaaatcggctaatgaacgtttcgccggtgcattggatacttacaccatcgaaggcttgatgcaggatggaaaggcattgcaatgtggtacttctcacttcttgggacagaatttcgcaaaagcgttcaatgtacagtttgttgacaaaaacaataaactggattatgtttgggctacttcctggggagtatctacccgcctgatgggtgctttgataatgactcactctgatgataacggattggtgttgccaccgcatttggctcctattcaggtagttatcgttcctatttataagaatgatgaaatgctgaagaagattgatgcaaaagtagaaggcattgtcaataagttgaaagcaatgggtatctctgtgaaatatgataatgcagacaataagcgtccgggattcaagtttgcagattacgaactgaaaggtgtgcctgttcgcttggtaatgggtggccgtgatcttgaaaacaatacaatggaagtgatgcgtcgtgatacattggagaaagaaactcgttcttgcgacggaatcgaagaatatgtacaacaattgttggaggatatccagaacaatatttatcagaaggcattgaactatcgtaacgaacatatcgtgaaagtggattcatacgatgatttcaaggaacaaatagagaaaggcggctttattctggctcattgggatggaaccccggaaacggaagaccggattaaagaggaaaccaaggcaacaattcgttgtcttccttttgatgctgatgaagagagcctgactccgggcaagtgtatggtaaccggaaaaccatctgctcgccgtgttctctttgcgagagcatattaaacttcgacacatttattttattttaatacattatgtggagtcggcagcagtgaatgctcccgactctttttgtttttatgtgatgattaatatagaaaatatatctatcagttttggcaacctgactcttttcagaggactcgacctgcaagttcattacggagaaagcgtatgtatttgtggtggttccggcagtggaaaatcttcattgctgaaagctgttttgggctttgtacctttaagtgaagggacaataaaggtggacggcacactgctggcacctagaacggcggatcatatccgaaagaaaatagcatggattccccaggagttggctcttccttcggaatgggtcagtgaaatggtgcggatgccttttgaactgaaggcaaaccgtgaggcgggattcaacaaagagcggctgatggattatttcgtatcattaggattggaagagaaactttatgataaacgggtaaatgaagtgtcgggtggtcagcgtcagcgtatcatgttggcagtgacagccttgcttgacaaacctttactggtagtggacgaaccgacttcggcacttgatccggaatcgtgcttacgggtgattaacttctttaaatccttgtgcagtaaaggaatgactatcttgtctgtttcgcatgacaaacagtttgccgccggatgcgacaaggtatttactttataatctgactgatgggaacaattgatatagactatggcagtttgggaataggattgctgctgatgcttattccggtttattttttatggcatttcaagacgggcttgcttaaaccggttctgataggcacggtacgtatgattatacagttgtttttgattggggcttatcttcgttttctgtttgaatggaacaatccgtttatcaattttctatgggtgatcatcatggttggggtggctgctgaaacggctttgacgcgtacgcggttaaaacgtggaattttgatgattccaatctctatcgctttttttgtaacagtggtgctcgtcggactttattttcttggttttgtattaaagttggataacatcttcagtgcccagtattttattccggtttttggtataatcatggggaatatgttgggagtgaatgtgataggattaaatacttactatgccggattgcgtagggaacagcaactttattattttctgttggggaatggcgctacccgtaatgaggcgatagctccatttgtgcgtcaggctcttattaaagcgttcagcccgggcattgccaatatggcagtaacagggcttgttgcattgccgggaactatgattgggcagatattgggaggaagttcgccacatgtggctatcaaatatcagattatgattgtagttatcactgtggtggcatccatgctttcactaatgatgaccatttttctggcctcacggaaatcattcgacagttatggccggttgttacgggttcataaggataccaaacggaagtaggggccttattcttgctttgtatacattttatatatttctttcaataaaatagaaaaacatgaatgagcaaatttggaaatatatagcagaattatcaactcccggtttctttgtcactgcggatataatgtatgaaggagaggaatttcccgtagatattaaagcatttatcattgataaactagctctgatagaaacaggaatatcagcccgcaaatttacgtttcattcgggcggatggcgtattcatcttacttttttcccgacagaccgtgttgttgacgagcgttatgctttgaaaaataaaatgataaagtggggaaagtataaaaaatagcttggttgctttttaaattcaaatggattgattatctttgcaatcaaattttcgcgaacgaatgaaaattaaggaaatagtaagtgcccttgaaaggttcgcgcctctgcctttgcaagacggatttgataatgccggattgcaagttggactgacagaagcggaagcaacaggggctttgttgtgtctggacgttactgaagctgttgtggatgaagctgtcatgttgggatacaacctgattatatcgcatcatccacttatatttaaaggttataaatctattattggtcgggattacattgaacggtgtgtgttgaaagccattaaaaatgatattgtcatttattcggcacataccaatctggataatgctcccggaggtgtcaattataaaatagctgaaaagataggcctcaagaatgtacgcatattagacccgaaagaagaatatttattgaagtttgtaacttttgtgccggatgcacaggctgacagagtaagaaaagctttatttgaagccggttgtggttgcataggtaattatgattcatgcagctataatttggaaggtgaggggactttccgtgcgcagagaggaaccagtccgttctgtggagaaataggcgaattgcataaggaatccgaggtgcgtatagaaacgattcttccggcttttaaaaaggctgcggtgataaaagcattattggcaacacatccttatgaagaaccggcttttgatttttatccgttgaaaaatacctggacacaagtaggttcgggagtggtcggagaattggaagagcctgaagccgaactggatttcttgaaacgcatcaagaaaacgttcgaagtgggctgtctgcgacatactcgtttatccggtcgtctgatacagaaagtagcgttgtgtggcggagctggagcatttttattgcctaaagcggtaagtgccgatgctgatgtatttatcacaggtgaagtgaaatatcatgattatttcaattatgagaatgatatcctggtagctgaaatggggcattatgagagtgaacagtatacaaaagaaatattttattcaatcatacaggagatgtttccggagctggaagtccagataacccgggtaaatacaaatcctattaaatatttgtaagaaaaactatggctagagaagcaaagaaagacccgagcgaattaacagtggaagaaaagctgaaggctttgtaccagttgcaaaccatgttgtctgaaatcgataaaattaagactctgagaggggaacttcctcttgaagttcaagaccttgaagatgaggttgccggtttgagcactcgtatcgagaaaattaaagctgatatcgaggaattgaaatcaaacattgcaactaagaaaattgaaatcgagacagctaagacttctgttgaaaaatataaagctcagcaggataatgtgcgtaataatcgtgaatatgatgtgttgacaaaggagattgaattccagtcattggaaatcgaactttgcgagaaacgcataaaggaatatattgcagcagaaaaagcaaagagcgaggagatagagcacagtaatcaagacttggatgaaagaaagaaggacttggaagcgaagaaatccgaattggaagaaattgtttctgaaaccaagcaggaagaagaaaagctgagagagaaagcaaaagtattggagacaacaatcgaaccgcgtctgttgcaggcatttaaacgtatccgtaagaattctcgaaatggattgggaattgtatatgttcagcgtgatgcatgtggtggttgttttaacaagattccgccccagaaacagcttgatatccgtatgcgtaagaaaattatcgtatgtgaatattgtggtcgcatcatgattgaccctgaattggcgggtgtgattgctgaacagcatttggaaactgtcaagagataatatatctcctgaagcagtatctttttctttgtggaaaaagaattttatcacattctaagcaagatcttgtaagaagatgttgcttagaatgtttttatatctacagttctgaataatggggaatctccggtagaaaaaggtatgtttttgtattgtaatcaatatggcagcagtaatggttcaatccgttgctgacaatcagataatcaactttcaggaccatgttatacctggttatctgatcaaatactgtttgcgtgatttctatatgtggagctttgtattccacaatcagtttggcacttagatctttgttgtagagcacagtatcacaacgtttttttgttccgtttaagtccagttgtatttcgttggccagtaatcccttcggatatcctttataatccgtcagataatgaacaaaatgttgtcttacccattcttccggagtaagggcgacatatctcttgcgaagcatatcgaaaataacattttttccatttcgctccgcgattttaatttcgtaggatggtaagtttaatgataacatttagtaaatttgcataagtgtaactcggtaataaccgatacaaaaatacaaaagattatgaaaacaaaagaggaaattgtagcaaactggcttccccgctacacaaaaagaagcttgaatgatttcggagaatacatccttctgaccaatttcaataaatatgtggaactttttgccgacaaattcaatgtgccggtattaggacgtgatgccaatatgacttcggcacatgcggaaggaatcactattattaattttggcatgggaagtcctaatgctgccatcattatggatttgctaggggccatccagcctaaagcatgtttgtttttaggcaaatgtgggggcatagataggaaaaataagttgggagatctgattctacccattgcagccattcgtggagaaggaacatccaatgattattatccgcctgaggtacctgcgttacctgcatttatgttgcagcgtgccgtttcgtcggctattcgcgaccatgcccgcgattattggactggaacggtatatactaccaaccgccgtatatgggagcatgatgaagagtttaaaaagtatctccttaaaacgcgtgccatgtgtgtggatatggaaacggctacgctgtttactactggtttttacaatcatattcctactggagcattacttttggtatccgaccagccgatgattcctgaaggggtgaagacggagaaaagcgacagtattgtaacgcagcaatatgtagaggaacatgtggagattggtattgcttcattacagatgattattgaggaaaagaaaacggtcaagcacttaaaatttgactggtaattttactgtgtatggcaaaagaaacaacatacgaagagatagcccgtgagctgaaaaaccgtatctataagcctgtttattatctaatgggtgaagagtcttattatatagaccggatatctgagtatatagcacaaacggtgttaaatgaaaatgaaaaagaattcaatcagactattgtttatggggctgatacagatatcgcgactgttatcaatgcagccaagcgttatcccatgatgtccaaatatcaagttgtaatagtaaaagaggctcaaaatataaagaatattgaagagcttgtttattatctccaaaaacctttggattctacaattctggtgttatgccataaacatggtacattggatagaagaaaaaaattggcagctgaaatagagaaagtaggtgtccttttcgaatcgaaaaagattaaggatgcccagcttcctgggtttatatcttcttacttgaaacgtagatcagtagaaatagaacctaaggcttcagaaatgatggcggaatttgttggagcagatttaagccgtatggctggagagttggaaaaattaattatcacacttccaagaggacaaaagcggattactccagaacagatagaacgtaacattggcataagcaaggattataataattttgagcttaggaatgctttggtggcaaaggatgttttcaaggctaatcagataataaaatattttgaggagaatcccaaaacaaatcctttgcagatgaccttgtctgtgttatttaatttcttctctaatttaatgcttgcatattatgcttctgataagtcagagcagggtatagccaatcagctggggcttaaatcatcatggcagtctaaagactatatggttgctatgaggaaatatagcggagtaaaggtaatgcaaattattggtgagattcgttactgtgatgcaaaatcaaaaggagtgggtaatccatctttgggagatggagatttgctgcgcgaacttgtatataaaattcttcattaattaacagggtcaagtaagattccgatgtcccgatgcttttattttttaagtgtcgggattcttttatcctttctctcagcagaaattctgttgatggctcaattgagaataatattttacattcatgcttctgttattatctcatttaatgctgtaagttatgcttttgttctctatttttctagatgatgagagatggatgatgagaaaaatagtattaactcgcttattcctagattgatagagcatttttcgccttcttagaatcgtgtattttaaagagaatgtccgttagtacatgaatatggtagtattttgccttttcggagtaaaatgaatagaagaatggggatgtgaaagaatgcagatgaagtgagcaaatagctaccatttatttttgtaagttccatacgctattttaaaattttgaatctatactttgttctcttatcgtgccttccatgattctcactatccatggattccataaagcgaagatgggttaaaacttggatgggttttaccatgaaaaatacattgacttgtaaaataggaaaacaaaatattcataggatcaagttggatcataaaacagatgaaatttactgttggaaataattataatttaattttgtaacattacacctgtaaaccctcttaatatagaaggttttataagttttacagatttagtaatgtgaatgttacaaatataaacaggatggtggtcaagagtgaatattacatatataaatgtgtatgaataattatttatcccttattttattacaataatatattataaaccaaagttttacatcttattgataaagctattgataacttgtatgcattttatttgcttatatagtcatgtttgtttgtaaatatattgttttttctgtgagtatattatagataatcagtattttatatacttatagttaaagtggtaattatggtgtttttaggagtggtttacgtgtgtaaatcttaatttatttccaacgatacaccgtctatttacttttgtaatatatacatttttatattgtaaatttgcatttatgaattatattaattacttttgtatctgtaaattttgccttatacttttgtaaatgaaggaaagaatcgctcaaataatccagaaagaagatatgactgcagctcaatttgcagagaagattggaatttcaccttcctctctttcccatattcttagtggcaggaacaatcctagcctagaagtcgtcatgaaaatacacaaggcgtgtgactatatcagcttagactggttactctatggtgaaggacaaatggaaacggatgttgattcagacaataacattcattatacgccttctttgtttgacgagaattcattatttacgcccgaacgtccggcttctccggaatatcgcaaggaaaatgaggttaaaacaccgctttattctcctaaagagattgtgcgtgaggaaattaagtatgtggaagtacctgccaaaaaaatcactgaaataagaatattctttgataatgggacttatgaaacgttcaaacctgaaaattagggtgggaatccactaaaatgccggttggcagaataagatttgggtaaattcgtgtatctttgcatagaaaacgaatttacccaattttatttcatgaaaaaatatattttagaccttgtggttacacagaacatcaaattgcatgccaattatgttctgataaaattgactcatgccaacccattgcccgagatgctgccgggccagtttgctgagatacgtatagacggttccaatactacttttctccgccgtcctatttctattaattatgtggataaaacaaccaatgaagtttggttcctggtgcaattagttggcgatggcactcgcaaactagccactgtgaaacaaggagatattgttaatgtggtgatgcctctcggcaatggatttacaatgcctcggaacgtgacaaaggtaaagccgttactggttggcggtggtgtgggtaccgccccgatgttgatgcttggtgcagagttggtaaaaatgggatgtacgcctgctttcctgctaggcgcacgttcatccaaagacctgttacagttggaaaattttgagaaattaggtgaggtgtatacaacgactgaagatggaagtatgggcgagaaaggttatgtgacacagcatagcgtcttgcatacagaccggtttgatatgatatacacctgtggtccaaaacccatgatggtttcggtagctaaatacgccaaagctcatggaatagaatgtgaggtttcactggaaaataggatggcttgtggtgtcggtgcatgcttatgctgtgtggagaacacggacgaagggcatttgtgtgtttgtaaagagggtcctgtatttaatataaagaaactattatggcagatttaagcgtaaatatcggcgatttaaagctttgtaacccggttatgacagcatcgggtacctttggatacggaaaagagtttgaggattttgtagacctcgaaaagattggtggtatcattgtaaaagggactacccttcatcatcgtgagggtaatccttacccacgcatggcagaaacccctatggggatgcttaatgcggtagggttacagaataaaggggtggattattttgttgaacatatctatccgcagataagggatattcatactaatatgatcgttaatgtatccggatctgctgtagaggattatgtgaagactgccgagatcatcaatgatctggatcatattcccgctatagaattgaatatttcatgccctaatgtaaagcagggtggtatggccttcggggtctccgcatgcggatgttccgaggttgtaaaagctgtacgtaatgtatataaaaagacgctgatcgtaaaattatctcccaatgtgacagacatcacagaaatagcacgtgcggccgaggcttccggtgcggacagtgtatctctgatcaataccctgctggggatggctgtcgatgctgaaaagcgtaggcctgtactttccactattaccggcggcatgagtggtgcagcggtaaaaccaattgcattgcgtatggtatggcaagtcgctaaagcagtaaatattcctgtcattggactagggggtatcatgggatggaaggatgctgtggagtttatgctagcaggtgccaccgcaatacagataggtactgccaacttcatagatccagctattactgtcaaagtttcagaaggaataaatgactatttggaacgtcatggatatacatctgtaaaagatataataggtgctttggaagtctgaaaattttatcttttaaattatagccctgcgagagtgtagatgaataaattgaagcatctcttgcagggctttttttataaccttctctagatggaatgagtatgaaaatggttgccgttgcaacttgttacatgggtataaaatgataacttcaattattttttttcgatgaaatggcttgtttttgaaaaaacggagtagaaaaacacttgaaaaagctttattaatatataagggaaaggaagatgaacttagattacacttaaggagagaacatcttttcggatatgatataagcaaaagaaaagaggtaaaagccctatgacgaacatggcttttacctctttattatttatatatattttttatttcaacaaatcgggtcttagccgctgtgtcctttctaatgactgctgaagttcccattctttaatctttgcctcgtgtccggataacaacacatcgggaacttgccatcctttgtattctgcaggacgagtgtatacaggagcagctaacagattgtcttgaaaagaatcggacaatgccgattgttcgtcagaaatgaccccgggaataatacgaactacggcatcggcaataacggcggcagccaactctccacctgtcaaaacataatcaccgatactgatttctttcgtaatgaaatgttcacgtattctatagtctatacccttaaaatggccacatagaataattaaattctttgcgagtgaaagtgagttggccatcggctggttaaactgctctccatctggagatgtaaatattatttcgtcatactcgcgttctgctttcaaagctgagatgcatcggtctatcggttcaatcttcatcaccataccggcaaatccaccgaagggataatcgtctactttgcgataacggtcgtatgcataatcacgcaggttgtgtatatgtatttctgcaattccttttttctgcgcacggctcatgatagagcagttaaagaagccttccagcatctcgggtaaaacggtaatgatgtctattctcatattcggttattttttgcaaaagtagcaaattcctctttgtcggaaggtgtttttcattcaaaaaatagctatttttgcgggaaaactaccttttatatatgacagaaatagaaagaatagaccaattgcgcgaggagcttcatcgacataactataattattatgtattgaatgcgcctgagattacagaccaggagtttgacaagctgatgcgtgaacttcaggatctggaagaaaaacatccggaacatagagatgagaactcgcccagtatgcgtgtgggaagtgatataaacaaaaatttcacgcaggtggtacataaatatcctatgctttcattggctaacacctattcggaaacggaagtaaccgagttttatgacagggtaaagaagtctctgaacgaggattttgaaatttgttgtgaaatgaagtatgatggaacttccatctctctgacttatgagaacggaaaactggtgcgcgccgtgacgcgtggcgatggtgtgcagggagatgatgtgacaggcaatgtaaagaccatccgcagtatccctttggtgctgcatggaaaggggtatcctgaagcatttgaaattcgtggggagattttgatgccttgggtggtgtttgaggaattgaacaaagaacgggaagctcgcgaagaaccgttgtttgccaatccccgcaacgcggcttcgggaacattgaagttgcagaattctgctattgtggcatctcgcaagctggatgcctacctttattatttacttggagataatttgccgtgcgacggtcattatgaaaatctgaaagaagctgagaaatggggatttaaaatttccgatctcactcgcaaatgcaaaacattgcaggaagtatttgattttatcaaatactgggatgtggagcgtaagaatctgcctgtagctacggatggaatagtattgaaagtgaattctttgcgacagcagcgtaatttgggttttacggcaaaatcaccccgatgggccattgcatacaagtttcaagccgaacaggcacttacccgcttgaacaaggtgacctatcaagtggggagaacaggtgctgtgactccggtggccaatctggatcctatacagttgtccggaaccgtggtaaagcgtgcttcgctccataatgccgacatcatagaagggttggatttgcatattggtgatatggtatatgtagaaaaaggcggtgagattattccaaagattgtaggtgtggacaaagacgcccgtattatgataggtgacaaagtaaagtttattactcattgtcccgagtgtggcagtaaattggtacgctatgaaggtgaagctgcttattattgtaccaatgatgccgcttgccccccacagatcaagggaaaaatagaacattttatcagccgtagagctatgaatattgatggtctcggtccggaaacggtagatcagttttaccaggaaggattgatacgtgatgttgccgatctgtatactttaaaaacatcggatatcatcaacctagaacgtatgggagaaaaatctgccgagaatataataaaaggtatagagcagtccaaagaagtgccgttcgaaagggtactctttgcattgggcatccgttttgtgggtgaaactgtggcgaagaaggtggcaaaatcctttaagtcgatggatgctttggcagacgcgagtttggataatttgattcatgtcgatgaaatcggagaaaaaatagcgcagagtatcttgttgtattttgctaatccgaagaatcgtgacattatagagcgtcttcgtgtggcgggtgtgagactggaagccgatgaggaggatacttcggaacacactgacaaactggcagggaaatctatcgtgatcagtggggttttcgcccatcattcgcgtgacgaatataaggagttaattgaaaagcatggcggtaagaatgtgggaagtatttcgtccaagaccagctttattctggcaggtgacaatatggggcccagtaaactggagaaagcgcagaaactgggtgtgaccattgtgagcgaagaggagtttctgcaaatgatagagtgactttttagcgagtataaagtaaaaatagtgtgatttttatcgctaaaatagaaaatattcgtacttttgtaggctattaaataagaatttataattcatttatgatacagacaagattaaaaggcatgggagtagcgttgattactcctttcaaggaagatgatagcgttgattatgatgcgttacttcgtctggttgattaccagcttcaaaatggaacagactttttatgcgtgttgggaaccacggctgaaaccccgactttgactaaagaagaaaaagacaagataaaacgtttgataatcgaaagagtgaatggacgtattcctattctgctgggggttagcagtaactgtacccgtgctgttgtggaaacgctgaaaaatgatgatatgacaggagttgatgccgtgcttgttgctgtaccttattataacaaaccttctcaggaaggtatttaccaacactataaagcgattgctgaagcaacggatcttcctgtggttctttataatgtgccgggacgtactggtgtgaacatgactgctgagaccaccttgcgtttggcacgtgatttcaagaatattatcgctatcaaggaggcatcgggtaatattactcagatggatgatatcatcaagaataaaccggctaattttgatgtgatttcgggtgatgatggtattacatttcctttgattactttgggtgctgtaggggttatttcggttatcggtaatgcatttccgcgtgaattcagccgtatgacccgtttggcattgcagggtgattttgcaaatgcattgactattcatcataagtttacggaattattcagcctgttgttcgtagatggtaaccctgctggggtgaaggctatgttgaatgtaatggggctgattgaaaacaaattgcgtttgccgcttgtaccgactcgtatcacaacatttgaaaagatgcgtgctattttgaatgaattgaaaataaaatgctgataaaggaatctttttaattagataagactggtgcttctcatataaaaaacaccagtcttttttttatgcctgcctgttcattctttgatatatatgttatacctgtaagattctatatctttcacgcataacattactaatctttcacctgatacattagtaacatgttacccgacacgttactaacctgtcggtctgtatgttagtaacctttgaaacgtcttgtctttaaaaaacaagtgcttgttttaactaactaattcccccaagtttgaaaactgagcctccgttttcaaactgagccatcctaattctggactgactcaagaaaatacaaaaaagactatcttttcagatagtctttttgtgatcgcgacaggattcaaacctgtaaccggctgatccgtagtcagctactctattcagttgagctacgcgaccgttgtttaatattttagtagtgaccgcgacaggattcaaacctgtaaccggctgatccgtagtcagctactctattcagttgagctacgcggccattgtaaaactaatcgaactttttggtggtgaccgcgacaggattcaaacctgtaaccggctgatccgtagtcagctactctattcagttgagctacgcggccattgtttattgttctttcgttttaacgggtgcaaagatacggactttttttgaaaatgcaagcgttttactaaaacttttttctaaaaattattcgacgaaacgggaattaaacagctgccagcctagtgttaaacctacattccaatcgttagacggtgagctatagtgatttacataggcactgatagaaccgaacgataattgaaagactaatgaaatttctccaagatattcgaattttgtgaaagctttcccgtaatatgcttgtccatattcatctttcttgataggaaagatgggtataaatccataaaattctccgcgtaattgaaaagactcgcttaactggtagatgggcatggtgccgactccggcatattgattagcacggaaagcctcattataggttactttgctatgggctgtcggagtgaattctcctgcctgcattaatgtagccgtataattgttggagaaatttcgggatgagtaatatgcctccagatacgctcccaaagtaaacttagggcttaccttatggtatgtttcgttctgatatgaaacttgaagccaggattgtacttttttataaggctccggtgtgcctttagtcactttggatataccggatctgaaatgttctgtgccggtgaaaatttgtgcagccattttttcacgacttccttgtgtggcaaattggcgggcattcaaggtacttccttccaatacgatagagcctccgaagatagaataagtgctttcatcatgttttgtttcgctgaagtcgatgatattggtttggaagtacctgtcctccatacgggctatacccacaccgaattcagcttttttacggcttagaaacggtaatgacaccttcaattttacaaactcttcccttttcttgttgaaagccggattgtctttgttggaaaagaatttggcttctttgaaataatcgaaggtagagatcgaggctatgaatttataagatgtaggcagtttggttggaaaatcgattcgtgctgcaagttgtacattattgtagacccggcctaactgtccgtcaaaattaaattcttttgaataatagttcaagttttgataagaagcaccaaaatagacttgattggagccactggaagacacgtttccaccgacacgaacggagagattggcctccattttgacctgaagattcaagtcgtaggtttggtctttctcattataaacggcatgaggaatgatttcggatataatattatcggacaacaaacggaaatatgctcgtttgacatcctccatagtgaaaacatcggagtcgttttcatgaaactctttttgtatatattgcttttgctgttcattggcaccggttatattaactcttttgaaacggaaatccggtaaattgctcttataggccagtcgtttaactttcacttgttcgggggtgattcttcgatgaattcggctttttatggagtccatcatttctatggcacgtttataaccaatgtcatgcaactcgtcaaagcgctggaagtccattaaattgacatcatcatatttaaaagtcatgaggatgccgagggaatcgggtaaagagtaatctgtcttttgcataatcatattttccagttgccccataatgtcaccttccttgggtttgcccggattggcggatacggcacttcctataatgatatctggatggaaggtatcacgcattacattcactggaaaattattgtaaatgccaccgtcgtatgccagtatcgagtctatttcgataggcttgaacatggcaggaaaactcatggaggcacgtacggcatctcccagatctccttttttcaatatcagtggtcttttgttgtacacatccgaagctatacagcggaagggaatatacaggctgtcaaaattggccttgcttgcagctgttgcctgaccgaataattgcagaaatacaatattcatctgaatgggatctacaatgctggtaggcaaaaactgaggtttgacattcttcagcgagtcttttaaggagatacggatgttgataaattcgggtgttggaggatttttcttgaaataatagatgtatttctcttccacattacctgaataccagcgtttgaagtcatcggatttgagtaaagcctccatttcatcgggagaatagcccatggcataaagtgaaccgacaatggctcccatggatgtgcctgcaatataatctatggggataccgttttcttctaatgcgcggataatgccgatatgggttaggcctttggcacctcctccgctcagtaccagtcccactttctgtgcatggatgggaggaagtagtaaaaagagaagaaaaagtatatatagataatgtttcatggatgtcgaatctttgtatgtgtcgctccaaatatagaaagaaatcttcgtttccaatcgttttttagaataaaaaagcgccggaaatgaacttcccgacgcttttgatagcaaaatgtgatagatttgttaaatcagttcgatactgcgttttacaaagtttgtcaaagcttcacctttcaacatgttgttttgtaacagagcaaggtcaatcaattggcggattactttgttaccacctgcgtattcacctaaaacagcttctttcttggtcttttcatcggccaactttttctcaacattacttaattcatctttttctgcttgaggtatttcatcagcttttttaccttcctgtgctttgtgaagttcgtcgtgacgtttattcagactggtcatttcagcttcaataggttcaagagcagctttgcaagagttgtccgcatcattcaaaacttgtttcaccagtttgtggtcgacattcagaaccaagttaaacatatccggcatttctccatagaaactcatacctgcctggatattggccatttctttcatacggcgcatatattcactttgggtaatcatgataggagttcctgtctcgcctaaagattgtgtttccacattgaactccactttcttcatctgtggtaactgactgcggaatacggaagatagaatatcgcgttggtcaacttccaaactggcatctttgcgctcttctttagcaatcaggtggtcaattacatcactgtccacacgggtgaagcggctcttttcaaatttctgctcgagcatacttaccatggctacatccagctgaccatccattaacaatacgttgtagcctttgtttttggccgcatcaatgtagctgtattgttcgtctgcatgggtagcatacagataaatcaagttgccgtccttatctgtttggttatctttgatcaagctttggtattcttcgtaagtgtaatatttgtcatctgtgtctttcagcagagcaaatttattagccttttcgtagaaatcttcttgagtcaacatgccgtagttgatgaaaatcttcaaatcatcccatttctcctcgaattctttgcggtcattcttaaaaatggcttgcaggcggtctgatactttcttagaaatataagtggagattttcttcacgttggaatcgctctgcaagtaagaacgggatacgttcaacgggatatccggtgagtcaatcactccgtgtaacagggtcaggaagtctggaacaataccttctaccgagtcggtgacatagacctggttgcagtaaagttggattttgtttttttgtaattcaatgttgctcttcactttcgggaagtacagaatacctgtcagattgaacggataatccacattcaggtggatccagaacagaggttcgtctgccataggatataactcccgatagaatttcttataatcttcgtctttcagctctaccggtttgcgtgtccataaaggataggtttcgttgattacgttgtcttcgtttgtttcaacctgctttccatctttccattctttctttttgccgaatgcaatggggataggaaggaagcggcaatatttagtcagcaatgaagaaatacgtgtttcttccagaaattccttgcagtcatcatctatataaaggataatatccgatccgcggctttctttttcaacgttttcgatagtgaactcagggcttccgtcgcaagtccatttcacagcttgtgctccttcttggtgggattttgtgatgatttccacttttttggctaccatgaaggcagaatagaaacccagaccaaagtgtccgatgatggcattggcatcatctttatatttttcaaggaagtcgttagcacctgaaaaagctatctgattgatatatttgtcgatctcttcggctgtaagtccgataccccggtcggaaatggtgatggtatcttttcctaagcttactttaatggtaagatctcccatctctcctttgaattcacctttagatgcaagggttttcagcttctgtgtggcatctactgcattagaaactaattcacggaggaatatttcatgatcactgtataagaactttttaatgatggggaaaatgttctcagtggttaccccaatatttcctttttgcatactatttatggttttaagttattatgttatatatacgtttgaatcgtctttttgttggatgatgggcaaaaaaaatgccagatacagtgatatctgacattttgtctgttattttttgaataactttggactctttacttttttttccacagtcatgacaatgaggtctttttctttgtcatagcttaccttgatcgtgtcaccagctgccatttctgatccaagtatcagctcggagatgccatcctccaagttgttttggatggcacgtttcaatgggcgtgctccaaactgtacatcgtaacctttggtggctacaaactttttggcatcttcgtcaataacaagcttgtaaccaatgtttttcacacgactgtaaaggcccttaagttcaatatcaataatccgggtcagtgcatccagatcgagttggtcgaaagttattatttcgtccaaacgattgatgaattcgggcgcaaaagacttattcaaagcttttgtaatcacgctgcgcgagtattctttgtcatcagtacggacctgggcggcaaatccgattccttttccgaattctttcagttggcgggttccaatattagatgtcatgatgactatggtatttttaaagtctacagttctgccataactgtcagtcaaccgaccttcatccatcacttgcaacaatatgttgaatacatcgggatgcgctttttcaatttcatccaataaaacgatagagtagggtttacgccttactttctccgtcagctgcccaccttcttcataacctacgtatccgggaggtgctcctaccagacgggatacggtgaatttttccatatattcactcatgtcaatgcggataagtgcatctgctgaaccgaacattagtttcgctaactccttggccaaatgagtcttgccgacacctgtcggacctagaaacatgaatgtaccaatcggcttattaggatctttcaggcctacacggcttctttgaatagcttttaccagtgtggcgattgctttgtcctgaccgataactttagaaagcagatcgtctttcattcctaataatttcattccttcagcctgtgccattctttgtacaggtacgcctgacatcatggaaacgacttcagctatttgttcgtcatctaccgtttcccggttttccttcagacttttttcccattcttccttcagggtatcaagctgattcgtatattctttctctttgtcacgataactggcggccagttcgaaattctgtagcctgacagcttcatttttaagagatttcatctcatcaatcagtttttcctgttcttctatttctttaggagcagtgatattagtaagatgtacgcgcgagccggcttcatctaaagcatctatcgctttatcggggaagttacggtctgtgatatatcggtctgttagtttcacacaagcttcaagggctgcatctgtatagttcacattatgatgatcctcgtatttatccttgatatttttcaatatctgaagtgtctcttctgcagttgttggttctacaataaccttttggaaccgacgttccaatgcaccgtctttttcaatgttttggcggtattcgtccaacgtcgtcgctccgatgcattgaatctcgcctctggccaatgcgggtttcaacatattggccgcatccattgagcccgctgcagaacctgctcccacaatagtgtggatttcatcgatgaaaagaatgatgttaggattcttcttcaactcgtttaagatagaacgaatacgttcctcgaattgtccacgatatttagtgcctgcgacaacggcagtcatatcaagagctatcactcgtttgtcaaataagatacgtgatactttcttttccacaatccgtaatgcaagtccctcaacaatggcagatttgccgactcccggttcgccaatcaaaatagggttgtttttcttgcgacggctcaatatttgtgccagtcgctctatttccttcacccggccaactacaggatctagttttccttcttcggcagcttttgtcatgtctgtgccgaaattatcgagtacaggagtatcattagccggctttttttgtgccgggcgtgcctgctgttgtgctgcatttgatttattgccacttggactctgacgtatatcttcgtcttcatcctcgtcctcactgaaccccagacctgcatgggtgtctggttgtaaagtgagtttgattttttcgtatgttacgccattgctttccaagacgtggaaagctgcattatccttgaccttcataattgctaacaaaatatgttcagagtcagccgcaatgtttctcaataacttagcctctagaatacatagctttaacactttggatgctttctcattaaagctaatattttcgtcataggtggtgtcattttccgcattgtttttcacaatggcctccaactgattttttatgtcctgtaagtttatttgcaaattaaacaaaatctcgatagcttttccttcaccttcacgtatcagtcccaacaacaagtgttcgggaccaatatagctatttcgcagcctgttggcttcttccttgctatacatgatgatatcggacactctttgtgtaaattgattgttcataaatttatcgtcctcctaaagtatagtatttatttcccagtgtgcaaagatacacataataacaatgcataccattgttttcttatttatattagcataacaaaatgtatgccaagctttgacaggctaaatggattaaacaaaaataagggttatagcgaaccattcacaaagtaaatgagaagtgggagtgataatcactatatactataaaataaggtatagggatactttttacttatataagtaaaaacatttaatggacttaacttttttatgggttttgtttcgtatgtcgtataaaagtagtactttagcgtggtttttggtaaaccaaaaagatgtataattaatatttgtttaaatgctagaacaagacagaattataaagattaacatcgaagaggaaatgaagtcgtcgtacattgattactcaatgtcagtaattgttgcgcgcgccctcccggatgttcgcgatggctttaaaccggttcatagacgtatcttatatggtatgattgaactgggaaatacctccgataaagcttataagaaatcagcaagaattgtaggtgaagttttgggtaaatatcacccgcatggtgacttttccgtgtatggagctttggtcagaatggctcaggattgggctatgagatatccgttggtagatggtcagggtaacttcggctctgttgatggtgacagccctgctgccatgcgttatacggaagcaagattaaagaaaataggtgaagagatgatgcaggatctttataaggaaactgttgattttcagaataattttgatgacacgttacaggaaccgactgtcatgccaacacggattcctaacttgttggtaaatggagcatccggtattgctgtaggtatggcaaccaatatgcctacccataatctttctgaagtaatcgatgcatgtattgcttacattgacaataatgatattgatattgaagggcttatgcaatatgtaaaagcaccggatttccctacaggtggatatatatatggtataagcggggtacgtgatgcttacgaaaccggacgtggtagagtagtgatgcgtgctaaggctgagatagaaactcatactacacatgacaagatcatagttaatgaaattccttataatgtaaataagaaggaattgattgaaaatatcgcatctttagtcaatgacaagaagattgatggtatttcgtatgtaaatgatgaatccgaccgtgaaggtatgcgtatcgttattgatgttaaacgtgatgcaaatgctagtgtggtgctgaacaaattgttcaaaatgacagctctgcaaacttcatttggcgtaaataatatcgctttggtccatggtcgccccaaaatgttgaatctgaaagatttaatcagatattttgtagaacatcgtcatgatgtggtaattcgtcgtactcagtatgatttacggaaggcacaggagcgtgctcatattcttgaaggattgattatagcttctgataatattgatgaagtgatccgtattattcgtgctgcaaaaacccctaatgatgccatagcagggttaatagagcgttttaatctgagtgaaattcaggcacgtgctattgtagaaatgcgtttgcgccaattaacaggtttgatgcaagatcagcttcacgcagaatatgaagaggtgatgaaacagattgcttattatgaagaaattctttcaaatgatgaactttgtaaaaaagtaatcaaagatgagttagtagaggtaaaagagaagtatggggacgcgcgtcggtctgaaatagtttattcttcagaagaatttaatccggaagatttttatgctgatgatcagatggttatcacgatatctcatatgggatatatcaaacgtactcctttatcagaattccgtgcccaaaataggggtggagttggatcaaaaggaagtgaaacccgtgatgaagactttgtagagcatatttatccggctacaatgcacaatactatgatgttcttcactcagaaaggtaagtgctattggttgaaagtttacgaaattcccgaaggaactaaaaatgctaaaggacgcgctattcagaatttgctgaatattgattccgatgacgtggttacagcatatctacgtgtgaaaaaccttaatgataccgagttcattaacagccattatgtgctgttctgtacaaagaatggcgtcattaaaaagactttgttggaacaatactcacggcctcgccagaatggtgttaatgcgataactattcgtgaggatgataaagtgattgaagttcgtatgactaacggtgataatgaaatcattattgctaaccgtaacgggcgtgcaattcgctttcacgaaagtgcggttcgtgttatgggacgtacggctacaggggtgcgtggtatgactttggatgaagatggtggcgatgaagttatcggtatgatttgtataaaagatcctgaagctgaatcaattatggtagtttctgaacaaggatacggtaaacgttctgatatcgaagattatcgtaagaccaatcgtggcggtaagggtgtaaaaacgttgaatattacagataaaacgggtaaattggtagctatcaagtctgttacagatgagaatgacttgatgattattaataaatctggtattacaattcgtttaaaagtcgctgaagtccgcatcatgggacgtgcaacacaaggtgtgcgattgataaatttggagaaacgtaatgaccaaataggctctgtatgtaaggtgacatctgaagaagaggttacagatgaaaattcaaatacagatcttgaaaatataactgaaggagagagtggtggtactactaattctgatactaattcagatttaactgccgaagcaaatagtgaagaataaaataaattgtattattaaatccacaaaatcatgagaaaagtattatttacagtggctttattgttaacagcttgctttgtgtctgcacaagtaagtgttgttaaggaggctaaatccttgaaaagcaaacctgaagaagctgcaaaagctatcgaaccggctttaactaatcctgaaaccgctaatgatccggaaacatggaaattagctggagattttcagaaagcaatttatgatgaagaaaacatgaaactttatttacccggaggtcaggcagatacaactaagctttataacagcttagctaagatgtatgacttctacttgaaatgcgatgaaatagagcaggctaaagtccaaagtggtgagttaaagaaacccaaattcagaaagaagaatgcagatgctttgaagactttgcgtttaaacctagttaatggtggtggtgatgcttacaataaaggagattatgctgatgctctaaaatattttggattatttgttgatgtagtaaacgagcctatgtttgctgatgatgatgagttgaaggctgacactttgaatgcattatatgcttgttatgcaactttagctgctaatatgctgaaagacaatcaagctgtcatcaaatatggcaatataggtaagaatcataaagaagaaggttatagagcattaatgtgcttggctgaaacatatggtcagaaagaaggtggtgattctgcaaaatggcttgaagtaatcaaagaaggtactgaattgtttcctaagcaagaatactttgttggtaatattatggattattatattcaaaaaggtatggttgatgagggtttggctcaaattaataaattgcttgctacgagtgaaactccgtactatctttatgtaaaaggtatcttattgtatgagaaaaagcagtatgatgatgcagttgctatatttaataaaattatttcaaacaacggagatttagttgctgaagcatattcaaagattggtgattgttattttttcccagcccagattattgttgaggaaaatgcaaagttagctattgatgatcccaaatacaatgaaaacgaaaataagattaaagagttgtatgagaaagctaaaccatattatgagaaggcaaaagaattaaagcctgataataaagctttgtggggaaattatttgctaaatatttattggaagttaaatagagctgagtatgattctttggaaaaagaattaggatattaatacgatctttctatttatttatgcacaaagcccagacttttccagtctgggctttgttattatctaaagtttatgtatctttagataatagttttttgcgttatggcaaaatttattttcgtttttattaatcaaccaaaatccctttttcaagtctatttacgagagttatttctgatatataattagtattatgtttaattaaatactaagtgaacattaatatgttgaagggtaacacattgtgatttgcttgtgctacccttcttgattctttattttattactaatataggtgtattagcatgaaatatcatttttcttgctatgctaggattaaacaatctagcaaatatgtttcgtttataatttgtgatgcaaatcacgtctatattttcttcttttacatagttgtccaaattgctcagtatgttatcttctttcactacattataatatagttccaatttagagtattgtttttgaaagtaatctttaatacctgctagttttatttcattccatgcatcgttatctgtacttaaatgaatgaaggaaacagcaaaatgaaacgatttaaaagcatttatcaaggagtcaaaagctattagatccctttggtcaaaattggtcacaaaagctactttttttatatcattgaatgtttttagtggtgtatgttctggaatagcatatacaaaggatttgcttctttctataacttcagctgtaacgctaccaatcaagtctatatctttttggcttctccctcttgttcccattataattatctgaggattatattctttagcatatcgtaagatttcttcttcgggaataccatcacgcaaaatacaagtatattttatattaggaaactctcccgactcaactttctttttgattgtatcagaaagtttattcaactcgttgtgcactgtttctatcatactttttacagattcttctctttcgatctgaaaattgaaattatcagttccataaggaattgtaggcacataaataggactgaaataagcatgtagaagcacaacttctgaattaatagcattagcaaaagaaaaaccaaattggcaggctttaagagaatagtttgaaaagtctatcgggataagtacttttcttttttctttatttctttctgagctgctctccttacctttgattatatcttctgaaagccatgcagaactttctataatctgcaaggcatgaggcaggtcgctttctttaattcttagccttactccagaagatatgacaggttgaataagattcacattgtgaatgtacgcttcaattccttcattctcaagtacattctttaaaatctgtgctttagcataagtgaggattgctaaggttaccaatttatcttccataattctatattttaagtgattttcaggttaaacaaaaaatcccaattgaatgttgcattcaaccgggattttatattacgcttcttgcgttactttttcttcagtttctctcaatatttgaagggctttttcaagaactgttgtatcatctagcattactagtcccccatctggtcccggttccaaatgaattccaacacttttaccattcttgaaattgtgtccaccaaaaaagttacgtacagtttctacggtcatattgagttcatctgcgattctgtgcatactcccactaggtaatgaatctttgattctgcgcagttcattaaatgttattgttctcatgatgtattaaatttagttataaaagtgagtacttaaatcatggtataaacttaatcaaaaaaatgcataaaacaaatctttttgtgctatttttgactatatgtaaatttataatggttaatttgctgattatagattgagtgtatgagtcacaatcatacctgctataataatgaagaaataagtagaaatgagaattatgtagaataaattaatatcactaatcaaataaccgctggcagtgtattgattagaaatgcaacgtggtttataaaagatttttttttgaataaatttataaaggagataaatcaaatatcctatgaaacaaccttctatagcaccaaaaagaatatctcccggataatgcactcctaagtagattctagaataggaattgagtacggcccaaaaaagaagcataaaagtaagagatttccttttaattagtaaagataaaaagacagaaatagcaaatgtgttggcagcatgactggatatgaagccaaatcgtcctcctctatatccgtttacaatatcaaccatatacataatattggggtcttgtgttggacggaaacgtgcgaaaaacggtttgcataaaccagaagctatttgatctgctaaagttatgactaaggcaatcataacgatagtcaataatgcttcttgaattttgttatttttaattatgatatataacagcatagcagctacaggtacccatacaattgtactggtagctacccacatgaatccgtcccaaaataaggattggcttccgttcaaattcagtagtaattctttatctgctgctatgtactgttgtatatccattgattatgttttaaatgatttcaataacattggtaggtacccatcccacattaccgtcttccagtttaatttctttccactccttcatcgtattatcttttattattactttcctaccttcatgaagaataaataagtctgttccactttggttaggagtacttttgactgtaacgctaggagccattataatagcgttatcatgattaattaattcagatttttgttctgaggcaaatatatttgctaaaatggtcactagaaagaaaaagattgctgaaataaatcctactttcttcaagactactcgttttccgaaaataaataaagacagtgccaatatcatcagaataaacatgataatgcctgtatgtgcccatgccttttcactcattgtattaataagtgattgagtccaggtaacaaaaaacattttactagaagggattaccttgtctacagttttgcttcgagccagttctaggttgaaacgaatatcactatttcctgggtttagcaacaaggcacgttcgtaattaaggacagctttggcaatgttattcattttataatagctgttacctaaattataataaatatcggaagattccccctcgttttttaatatattctcatacatctctacagaagctgcaaagtcgtttcttatatatgcactatcggcttctgtctttgttgggaaagtttgcacagcagcactttgtggcatttctgtttgggcggtaacctgtgcagagtctgattcattctgtgcgtagactgtgacaaaacttatcaggaatatcaaaatgaaatatatttttgtcattgttataatctcctttgatttagtgttttatactattctccattttgctgatgacctcaacagccgaagaatatactttatccatagcttcattctgattacccggagcatagcgggcgaactcgcattcattcaatgttccgatgaaatctttaatcagttcgggggcaacaccatatttggtcaattcgtcctcgatattatctttagacaattgagaaaccggaatattcaacttatcactgatgtatccccaaagtgctttcaacacctcatcatagaatgcttcttgtttgttttcagctaataatctgcctgcatttttcatgcgtttggcagccactttattcgcttttttagtacgtacttttgctacatttgcattttcaatagcttttttacgatagacaattacgaaaacaacgaagagaaccaatggaatgatataccatagataatatgttgttgagccaaagaagaaatctcccttacgagttaaactagtttcccccattttgatgtagcggatgtcttgtcccaatactttcaaatcttccttgttggtaaagtctgcaataacttgatctgcatttcctgcacctttttccacttttaggttgtaagcttctgtttttattgttttatagctattgctttttaagtcaaaataggaaaattcgacaggcggaatagtgaaattgccggcatgtcttggaattgctagatattctatcaccttattgcctgacaaaccttcgcgagttaatgtaaatttattgtcaatcttgggatcgtatacttcaaaatcctttgggaaagctacttccggagtattgaccaatttcaaattacctgtaccagaaatgactaacttaatggttacagcatcatttgttttcagttcttttgtacttatagacgaactgatagtaaactctcctactcctccggagaaattagccggtttgccatcgggcaatgctttcacattgatggtcagcttaggagtgacaatgtttttctttacttccacatagttacttccaccattaaagaaagcatcaaaaggatcgtctgaggcaacttgttgagctataaccccttcaaaggtaatagacggaatttccattttacctgattgctgagggaaaagtacatactgactccacacggtagtgttatagtttcttccgttataatgctccaaagagaatgtcttttgttggggaagttctacttcttgtgtatggaaattcttcaaatccggcattttcccgtacaactgtctcagatttaccaaagtatagaccttgtatgtcaataagatggcttcctgttcataaacagtagtcttacttgctgttgcggtaataaacaaatcttgattggttattttgcttccggcaacctgactgcgtgaagaagttcttccaccgctattgtttccacctccaacaccatttgtttgatcaggcggtaatactttgatttgtacggaatttgaagttttgttttgtccgtctgccacaatagtagcaccaggaatggtgtaagttccttctttatcagccatcaaaatataagtaaaagtaatggagctggtagaagtaacattaccatttataatctgtgtactactctgctgtgaacggcttggtcccattaagacatcgaaccccttgatattaggtgcacgaaaatccctgactttatgagtgttgaccgtataagtcagccggaactgatccccgcttactactacatcaggcgcagaagcggtaaacgtcacatttccgtctgcccatgctccgagcaccgatgttattaatatgaataagagaattactttcctcattgctatctaattatttttttatttgccaaaattaagaaattaccagtctttatccaacttctttccttgaatttgcagttgttttttaactttgtcttgcacattcttttcatcttgcatcacagcattcaataattgttgggcattttccttggacatttcatccttattttgctgctgttgctgctgattttgattttgttggtctttcttatcctgttcttgctggtttttgttctgatcctttttgtcgtctttctgatcttgtttttgatcttgattcttatcctgattctggtcttgattttgctgttggtctttcaacagcttttgcgccaaagccaagttataacgagtttcatcatctttcgggttattccgtaaagattccttataagcctctatacactgtggatactgcttggacgactgaaggataactcccatgttatgataaatctgtgccagtttatccttgtccttctctaccttagaagcagattcaaactgttccatcgcttcctttgctttttgctgcatcaagagcgagtttcccaaattgaacatggcatctgttgatttcgggttaatttccaatgccttacgataatctacctccgctttgataaacaagctgtcattatacagcttgtttccgctgcgcagataatctctttctgttttttgggcgaaggcactgcttgccacaagtaagaataacagagtgatataggttttttgtaacataagcattccttatttaaatagtctgacatttttgaaaagcggatttttccgttccaaaataagcatttctaccaccagcaggataagcaccagccatgccaaagcctggaactgttcatcaaattcagtataaacctgactttctacatcagcttttgacagtttggcgatttcattgttcaataccttctcggcagagttggtattatccacgcgaatatacattccattgccagccttggctatttcctggcacatctgctcattcaagcgggtgacgataacatttccatccttatcgcgacggaaattgttgctaccgtcctcagctggaattggagaaccatccggtgaacctactcctaatacaaatacctgcatacctttttcggctgcttcttgggctgcttctactgccccaccttcatgattttcaccatcggtaatgacaataattgcacgtcccactccttcttgcggagtaaaactcttcattgccaggcggatggccgcaccgatatccgtaccttgtgtggttatcaatgacggattaatggtttccaagaacattttggcggaaacataatcgcttgtgatgggcaattgcgtgaaagcatcacctgcaaaaacaatcaatcccactttatcattattgaacgtatctaccagtctggaaatcaatttctttgatttgtccaaacgactgggagtcacatcttctgccagcatggagtttgaaatgtccaaggcaatgacagcttccactccacttcgtttcaccgtttccatctttgagccgaactgtgggcgggccaacatcagtataaccaatgtcaacgcagcaaaagtcagccaaaacttgatgtcaggacgatacttggaaatagtcggcatgagccctttcagtaatgccggatcaccatatttgcgaatattttggcggcggtgataattggaatacaaatacagcgccaccaaaaacggcaataggatgagtaaatataaaaagttcgggtctgcaaatcgaaacatgactttctttttttaaggtattttctttaatactgagttacgcaacaagagttcaagcaaaatgcagaagaaagcaatccaggcgaatacctgatattcttcttcgcgtttgctgaattccttcacgttcaacttcgttttctccagtttgtctatctcctgatagacttccttcaacttggaattgctggtggcacggaaataatttccgttcgttgtacctgcaatctcggtcaaagtcttttcgtctatctcgacggggacattcacatattgcgtccctgcgtaggtctgcatcggataaggagcagttccgtttgtaccgacaccgatggtgtagatcctgattccgaactgtttggctatctcggcagccgtcagcggagaaatatctccacggttattgctaccatccgtcagcagaataatcactttcgatttcgccttgctgtccttcagacgggtcaccgcattagcaatgcccatgccgatggcagtaccatcttcaatcagtccgcgctgggcgatatcgcctttgatgctgttgaacagattcagcagcaccccatggtctaccgttagcggacattgggtaaaactctcaccggcaaagatggtcagaccgatattatcattggggcggccgttgataaactcggaagctacttgtttggcagcttccagtcggttgggtttcaagtcttcggccagcatactggtagaaacgtccactgccagcatgatgtcgattccttctatttcggtattctgccagttgtctgtggtctgagggcgtgccaagatcaggattaccatgatgatagccaccgtacggagtacgaacggagcatgcagcaagtaaatcttccagcttttgggtgccttcatatacatgcgtgtggtagaaacctgaagcgtaggctcggttttcttccgcttcatgacgtaccatactatataaggtatgagcagaaccagcagaaatagatattcaatatttgcaaaaatcattgttcctagtatttatttgttaaaaccagaggttatatacaccactcagcaccttatacagaattaccacaatagcaataacaatgatgctgatgctgcccagcagaatcattctgccctgtttgcttcgcttttcctccacggtgatttccgtaggttcgggctttgcattcgggtctggttccacttttgtattattgatgaagtctactgcgtttaccagattcatatcattttcgttcatcaacggagaatgtttggcgaatttcaccaggtcggcagtctggaacaaatacatcaaatccttgatagattctttgtcgttgatttcctgtagcttatcaataatttcggatgaagtcatctccatagcgttaaagccgaatcgttcttccatataagtgcggagtacatccgtcagctcggtataataggtcttcggatcggctgtacgcaaggttttgtctcccttgatacgctctatttccttcaacgcctgctggtgtggcggcaacttcggttcaatcttgatcttcttgatgataggcttgttatccttgtagcgtacaaacagatagtaagccagtccgcccaaagcaagcatcagcaaggtaagccatacgatggccgatacgtcatcccaggtgataggtacttcacgaacggtcttcggtccgaagaattgttcgggatgcagcgtatctaccggaatggaatatacttttacggccaatgctttggaccggtaaggctctccgtttaccatcacctcgaatggggggagatagtaaagtgccgagtcaaaagaggttattgtatattcctgttttatcagcatacgttttccatcgttcagcatctgggtatcaggcttggctatatccaatatctccactccttttaccaatgtatcgcgcaggaacggaagttgcagtttttgcttggcatccatgctgatttccagcttcactttagcctgttcgccaatgagaagttgcagcgagtcaatgctggcgtctaccgtaacctgctgtgcctgtgcctgtccggctgttatcagcataattgcacaaactccagctttcaagaactttttgctagtattcagtatattcatattctttaatttcgtttagcaaataagttaagcaacgatttcacataatcctgatccgtgcggatagatacagagtccacattacttttggtaaatgtttcattcaatactccctgacgctgtatccaccagtcattatgtgcgcgacgcaaagctcgtgacgaggtgtcaatccattgctcgtggccggtttcggcatcgcgtactttcattagtcccacatcaggtaactctgccatgcggcggtcgtatacctggatagctacgatatcatgtttccggttggcaatggtcaaagcattgcggaagtcgttttcatctataaagtcgcttatcataaaggtggtgcaacgttttttaattacgttggtcagatattccacagccatctttatatctgtacgcttgctttcgggcttgaaatcaagcagttcacggatgatataaagaatatgtttacggccttttttaggcggaatgaatttctcaatccggtctgaaaagaaaataactcctattttatcgttattttgaatggccgagaatgccaatgtagcggcaatctcggtcaccatatccttcttcaactgcttcaccgtaccgaaatccaagctgttcgaaacatcaatcaagagcataaccgtcaattcgcgctcttcttcaaacaccttgacaaagggtttgttgtagcgggcggttacgttccagtcaatgtcacgtacgtcgtcaccatactgatattcacgtacttccgagaatgacatacctttgcccttgaatgcagagtgatattgtccggcaaagatattgttcgaaagtccgcgtgtcttgatctcaatctggcgaacccgttttaataaatcacttgtttccatactgttcgtactatgttgtttatttatccggtgcatcggtttctgttttttctcctatcgagaatggtttttcaaacggatgcatttggtgttccacccaggtgggacggcagtcccacatagatgaaacgggagttccacatgggtggaatggcggtcccacccatgtggaactctgtactcaaccttttgtttccaagtcttcttcctaactgtcaagcaattaagaactgcctcagaacacaatccttagggtacttccactttattcaggattttgcttacaatttcatcagaagacatgttcatggcttctgcttcgtaagtcaagccgatacggtggcgaagcacatcgtgagcaactgcacgaacatcctcgggaattacgtaaccgcgacgtttgatgaacgcataactgcgtgctgccaatgccagattgatagatgcacgcggtgaaccaccgaaaccaatcatgtctttcagttctttcaagtcatatttttcagggaaacgggttgcgaatacgatatcagcgatgtattgctctatcttttcgtccagatagacttggcgcaccactttacgggcttccataatatctgttgctttcagaatggggcgaacttcgattttctctccggtgatattttggcggatgattttcttttcttcttccagtttcggatagtcgataataactttcagcataaaacggtctacctgggcttcgggaagcggataggtaccttcctgttcaatcgggttctgagtagccattacaaggaaaggttcgggtagcataaaggtttccttgctcagtgtgacttgacgttcctgcatggcttccagcaaagcactctgtactttagccggggcacggttaatttcatcggccaatacgaaatttgcaaaaatcggacctttctttgctatgaattgttcgtctttctgactataaatcatggtaccgataacgtcggcgggcagcaagtccggagtaaactggattcggctgtacttggcatcaatcaaagatgcaagcgttttgatcgccagagtctttgccagacccggaacaccttccaacaggatatgaccatcggacagtaaaccgataagtaatgattctaccaaatgtttctgacctacaataacctggtccataccagtcattaagttggttacgaacgcactttgtctttcaattcgttcgtttagttcgcgaatgtcaattgcttcagccataattttgtttttatttagttgtttctttattgatctaataacgggcttgtaaatagccttgttcatttaacgcagccaaaattacgctaattaattaacagcggcaactaatttttattaaaaaagtaaagtgcatctctactttttaaaggttattgggctaaagaattttaaaatacaaagataaggtttgtagagtgagaatatcagttgaacgcacttttttttacttcttgtattttgcctgctttatttatgccgaaagcaggcaaaatgcaagaaggcttattttttaggagttagttcaggaatacgcagagtagtccctatgggtactctgtcggcatctttaatgatgtttttattatgtttcacgatatagggccatagcttttttgtaccatagaatttcactgctaattttaccagactctctccttcttgtaatgtgtaattagttttagtccctgttatgtcatattctacagtgtcggctaaagtctcttttgcaacatttgcggttgtcgcaacgcctgaactcttttccgtactaggagatacagtctgttgtgattgactgatggtctcttttccggcaacattcgtccatatgtttgcggtatctttaccttgcatcaatgagtcattaaccggaattgcaggaatatcctcttccaattgttcttgggtgttttttattgtagccggcgattgtaaatccgaagttttatctgattgcaaataccaatatatgccacctgcaatgcaggcaatcaaaatgatagcaagaataactccctgggaaactctgttctttttctcttctgagatttcttgtgtctctgttgtttcctctatcttctgttctttttcaaaatcagaagtaacaggagttattactgttttctctgacggggttgcctcttctgacgctattgtttccaaggatgttttttcttcacaagctttacgagcagccagtatggctgcatcggcgatagtcataacttcttcttgaggtttgtctgttacctcgtttccttctattgtttctgctaaaggggaaaccgtttggggaacagctgtttcagcaacaatatccttttctgcttcagtgacaatatcttccgattctttttccggttctataatttgtatcttttcctctgtaatttcaacagaaggtacaggttcttcaataattgtttcctcaataaccggagtagtgtcttcagcggcaatggcattctcatttggagaatcttctgtattttccgcttctatgaactcaacctctttagccgcaattgtttgtttaggcttaggcgcgtttccgtcaaaggtatcttcctcctctccttctatttctgtttcggtatcttccagtttggtgttttcatttaatataaccgtttcaaaatgagcgaatggtttatttattaaatctttcatactggaatccggagtaaaagatatttttgtatggccctgtatttcaattctttcccccgtatttacgtttacactttcacgactctccacctctgtaagtttaaacgtacctagtcctttaacctttacatacttttcagtaactaaagcttcctctatcagttcaaacattcctttgacaaagatttcagcatcttttttagtcatgctgtgtttctcagccaaaagttcgatgatatcttgtatggttactttctcgctcatgataatattataaataagggctattttatttaaacttttcttttaaagttacactgggtttgtaagtcagcactaacttggggggaatcagcatacgttgttgagtagccgggttgatagaaattctttccagctttttcttaacctcaaacgtaccaaatccctggattgcaatgttgttgccatcttgcaattcctgggtcataacaccaatgactgaggataccaattgtgatgtatctttattcgtatatcctagtttacgtgataattcagatataaattctttgttattcaaagcttaaagtgttaatttggttgctatattagtaaaaaaacaaacattatccaaactttataagggcaaaggtctataaaatgctggcgtataggtcgaaatcatcagcggctgtaattttcactttatagaattcacctatttttaagtactcctcatcagcttttatcaagacctcaggatctacctcgggagagtcaaactgggttctgcctatgtagtaatctccttccttccggtctataatgactttaaattctttacctattttcgtttggctcagttcgccggctatttcctgctgaagtgccattaattcatccaaacgctgttgtttcacttcatgagaaatggaatcttcgtattctttagcggcgaatgttccttcttcttccgagtaagcgaaggctcccatccggtcgaatcgtacttttttgacgaattcttttaattcttcaaaatcttcttcagtctcaccgggatgtcctaccattaatgttgtacgtaagtgaataccgggtacttcccgacggaatttttcgattaattcgtaggtttccgctttacttacatgccggcgcattttattcagcatattgtcactaatgtgttgcaaggcaatatccatatatttgcatacattatcgtgttcgcgcataacacggaataattcttccggaaaatgggccggatatgcatagtgtaaacgtatccattctacaccgggaacattggcgattctttcgatgagttcgggtaatttctgacttttatataaatctacgccgtagtaagtcaattcttgggctataatttggaactcttttactccttcggatacaagtagtttcacttcatcaataatctcctccatcggccgtgaaatgtggcgtcctgtaataataggaatggcgcaataagagcatttacggtcacagccttctgatattttcagataagcgtagtgatggggtgtggttaatgtccgttcaatggcaaattccgacttgtatgctttgcctaaatctgccagcaactcattccagttaaacttaccatagaatttatctacttgaggaatttccaatgccaattcttttagatatctttctgaaaggcagcccatcacatatagttttttgagcttcccttcttctttggcctgacaaaattccaatatcatattgatcgattcctctttggcatcaccgatgaaaccacatgtattaataactgcgatttctccttgcggtttgtcggaatcgtgagttactttataaccgtttgcttccagctgacgcatcagcttttctgagtctactaagtttttggaacaccctaaggtgatgatatctattgtgttacgtttcatttattattcagtctctccaaatagtgagtctacaaattcttttttgcggaatacctgcatgtcttcaatgccttcgcccaatccaatatattttacgggaatcttgaactgctctgagatgccaattacaacgccccctttggctgttccgtccaatttggtaattgccatagcagtaacttctgtcgccaaagtaaactgtttggcttgttcaaatgcattttgaccggtagaaccgtctaaaaccaataatacttcgtgaggtgcgtccgcaacaactttcttcatcacattcttgattttagtaagctcgttcatcaaacctactttattgtgaagtcggcctgcggtatcaatgattactacatctgcattattagctacggcggaacttaaggtatcaaaagctacagatgcgggatctgatcccattttctgtttaataacaggcactcctactctttctccccaaatatccaattgttctacggcggcagcacggaatgtatcagcggcacccaaatagacggttttgcccgccttcttaaattgatatgccaatttaccaatggttgtggttttacccacaccgtttacacctaccaccatgatgacatagggcttcttaccttccggaacagtgaaatcatccgaatccaccgtgttattttcagtcaataatgccgctatctcttcacggagaatcttgttcagttcctgagtgtttacatatttatctttggcaactctttcttcaatgcgtttgatgatattcagagttgtttcaacgcctacatccgaagtgataagcacttcttccagattatccaatacttcatcgtctacttttgatttacccgctacggcacgggcaatcttactgaatacactttctttggttttggacaatcctttgtctaaagtttccttcttttcttttgagaaaaaattaaaaaatcccatattggagtctgatttatctgtttatgctacaaagatataactaatctcttacacggacaaaaaaaagtgtcacaatgattggtcataatgtattatgatgataacattgtggtataaaaaaagttccttccataatatatgaaaggaactttccaccagtcattccgactgaattatttcttgaaaaagtcttgaactttttcgttaggtaccatttgctcatcgaagatgtaagctcctgttttcggagatttaaccatcttgataaccttagtataagaacgtccttctttacctgtctgaagggttgcgactgttttctttgccatgggttataattatttaatttctttgtgaactgttactcttttcaaaataggattgtacttcttaagctccaatctttcagtggtattttttctgttttttgttgtaatgtaacgagaagttcccggcataccactatccttcatttctgtgcattcaaggattacctgtactctattacctttagccttctttgccatagtctatctctcctttttaattaaccaataattttgatgcttttccaatcacaatagcctttggttaccgcttcattcagcgctgcatccaggccttttttattaatcacacgtaagccgttagcgcagatgttcaggctaatccagcaatcttgttctacatagtagaatttcttagtaaacaagttcacatcaaaagttcttttggttcttctcttagagtgtgaaacattgttgccaatcatggctttctttccggtaatttgacaaatcttcgacattgctatcttatttttatagtttttttcaatacttatttcaaacggagtgcaaaataagcacttttatttgtataaaacaagagtttttgcaaataattctgcaattactgctcattttcttcgttttggaacaactttcgaagcagttgcagtgcattttgggttgcatttgcaatgtttttgtttcttccttcgtcgccttccaatttcagtgtaatcactttgtctttacatccggcagcaatccaaatggtacctaccggcttgtcgggagtacctcctgtgggccctgcgatacctgaagttgctacagcacaatcagaattcatcgatttcatcgctccttttaccatttcgataacggtttcttcacttacagctccgtgagtttctaaagtttcgtggtttacccctaacagactttcctttatttcgttggaataggcgataattccacctttaaagaattgtgaacttccggcaacggctgtaatagcggccgccacacttcctgccgtgcaactctcggcagtaacgagtgtcaggccctctctccaaaacaaatcgttaatctctttacttaaaaatttaccttctactgacatgttgaaaacggttttttaatattaaatagttacccgtgaataagcgggcttgtctatagtgcaaaaatcattgtccagatacttgtaataaccggtaattgcgatcattgcggcattatccgtagtaaagctgaacttcgggatatagatattccaaccatatttcccggcatgctcgcggaatgagttacgaagcccgttgttggctgatacccctccggctactgccacttcatttatcttgagatttttggctgcttttctcagcttgtccatcaaaatatctacaatggtcgcttccaatgaagcagccaagtcgtttttatgatgttcgatgaaatcgggatcttctttcaaccagtcacgcaaagagtataggaaagaagtctttaatccgctgaaactatagttatagtccggaatatgtggtttactgaaagtgaacgcttttggattgccttgacgtgccagtttatcaatgataggacctccgggataacctaagcccattactttagaacatttgtcgatagcttctcctgctgcatcgtcaatagtttgtcccaaaacttccatgtcattataggcctttaccaatattatctgtgagtttcctcctgacaccagcaggcacaagaaagggaatttaggttggttgttgtcttcttccgattctttaatgaaatgggctaacacatgggcttgcaggtggttaacatcaatcattggtatattcaatgaacgtgcgaaacctttcgcaaaagatactccgaccagtaatgatcccatcaagccgggtcctcgggtgaatgcaacggcgcttagttgctccttggtaactcctgccctttttaaggcttcgtgcaccaccggtacaatgttttgttgatgggcacgtgacgccaattcgggaaccacccctccgtaagcttcgtgaacagcctggctggacactacgttggacaacaatacgccattcttgataactgcggctgatgtgtcgtcacaggaagattctatacctaatataattgtatccatatttctataccttattatatatattaatgtgtcagaatttcaagtccgttatctgtcataacgaaagtatgttcccactgtgcagacggctgttcgtcttcggtgactacagtccagccatcttcctcatcaatgaagacttcccatgttcccatattgatcattggttcaatggtaaaaaccattcccggcaccaatagcataccagttccttttttcccgaaatgttctacatccggttcttcatggaactctatgcctactccgtgtccgcagagatcacgcactactgagaatccattttttttagcatgtttttcaattgcatgtcctatgtcccctacaaaaccaaatggtttcgcagcttccatgcctatctccagacattctttagctactcgtaccagtttttctttttgaggtgtggtttttccaatggtaaacatacgcgatgcatcggcataataaccatcaagaatggtagtacaatccacattgatgatatctccttcttccagaatatcgaattcattgggaataccgtgacaaacaacctcattgatagaggtgcagcaacttttgggaaaaccgtcataacctaaggttgcaggaatgccgccgtgatctttcgtatattcataaaccagcttgtctatttccaatgtgctcatgcctgcatggatctcatgttctacaaggtctagcactccggtattgacaataccgctacggcgtattccttcaatctgttccggtgtcttgatcagttcacgtgaaggtactaaatgacctctatcttgataatagagaacctttttatctaactctgtgagttccatacctttgggaactctccagtttattttatttcttttcatatcaaaggattaattgacttacaaagttagaggaaatatttgtaaaaatggctcatccggcaataaatatcttcataaaaagagaatttacatgaaatttgacagaaacaaatgttaaataatcatgtcttttacatgaattttatgtaggagagtctattttattttaataaaaggttatatttaccgcaaaaaactaagcattctattattaacttctttaattgaacatcaaaatggataaacatcaaattggagtaaacgcaggaaaagtttggaaactgctgaatgacaataaacggtggagttattgtgatttaaaaagagcttcagaattgtctgacagagatttgaatgcagctataggttggctggccagagagaataaaatagactttgaatgttctaacggagacgattgcctgtttctgagcgtcaatgtttatattggctgaatacgagaaacagataattatgtggggccaaaactttcataattatctgttttctttttttaatcaacttttctaatcactttggccggattacctacagcaacggaattgtcgggaatgtctttagttacgacacttccggctccgataatacagcgatgacctatttttactccgggacaaagaatagctcctcctcctatccagcaatcttctccgatagttacgggatatgcatactctttgggttcgcgtcgggttatgtaatctaccggatgatgtggagtatagatctgtacattgggccctatcaatgtatgtgctcctatggtgatatatccaccatctaaaaatgtacagttggcattcacaaagacatgctctcctaagcggatgccgtgtccatgatcacagtaaaatggtggacagatgacagaagtggaagggatacccggcactaattcttccagcacttccctgaaaccatcatcgtatgtactcatcatccgtaattgggccactagttttttggcgtatatgaaactggcctgtatttccggtttctccatatcggccagctgactgttacgcattttgtctatctcgttcataattaaagggctttaagattttgcctcaaatgtaggatttgttttccgttctgccaaatatacaccacacaagataagaaaacagccggtaagggctatccaagttatcttttcattaataatgaccgctgaagtaagaagagttaccaaagggacgatataaatatagtttgtactttttacggctcccaattccttgacacaagcattccaggctatgaagcagagcatggaggcgacaaatcccaaaaagaggagatttccaaacacgatgggttgcatcatcaagatattgtcccaatttaacggacggaataaaaacatgggcagaatggtcagcactccgtagaagaatactttacgggtaatgaatacgatagaataatgattatccaattgtttgagaataaggcaataaaatgcccacatcaatgcagcggtcagtgaaagaatatctcccaaaggattaattttcagaatgaaactgccgttgaaaacaaccagccccactcctatcaaagccatgatcgatccgtaaacaagatggcgggtgaaaggttcttttcttctgaacaaataagaaagcagtgtggtcagaacaggtgatgtgcatactatcagagacacgttggaggctaatgtgataccgagagccgtattttcagtaatgaaataaatagttcctccacataatccggccaataaaagtaacaattcatcttttactctgttggcaaatagttttttataagaaatacaccacatgcaaagataggccagagtgaaacgataaaagaagatgtcggaaggacttaatccatgttggattagaatcttagtagaaacaaaagtagttccccagatagctacagtgattattgccattaagtgatagacgaaccttgatttgataacattcataatttatatgtgttttattatgttgcaaagataggttttgttttcgagaaacttatcaaaatatatggcatagttgagctgatacaaagttcgtttgttttctcacttaccttgggcgcggccctcaaggtaagtgagatatttctatttccggggaatccaggaatctaccagctcctgatgttcttttacccatttttccgctccttctttttcattatattcattttgtgatacatcatccagcaggctgctgatttcttcggtgctcagatgtatgttttctatcagttttgccacaaacgggtgttgctcaccaaatcctttgcgggcaatggccgtaattgtttccgctttaccaaaaatacctttcgggtcctccagaaattttaatttaaagcgggtgaacatccaatggggagtccatcccgtcaccacaatccattgatgctcgtcaacggctctttttagtactgcggtcatggccggtccgctagactccagcaatttgtaatccagattgtatttttctatggccatatctgtagcatgcataatccctgcaccggcatcaatgccgataatctcgcctccgaatttttctttgttggcatttaattgctcaatggaatgaatgtccacataatcggggactaccagaccgatacgggcatccggatagatcttgcctaagatttccagattctttccgtattgtttcatataatcggcctgtgtagccggtaaccaagcatccatcagcaaatctactttgccacgggccattgttgcatagataggagccggatcggcattctttaaaacgacatgataaccttgttgttcaagaatcacttccgtcaaataggtcagggcgatgccgtcgtcccagtttatgtatccaatgcttattgtcttatcatcttttttcccgctgcaagaggcaagcagcaggaggaaagacaaaaaatatagtattttcttcatgcttatttccctttcttttgttttccaagtccttgtgttattctatccagaatgatggccaggatgactactgcgataccgccttcgaaacctaaacctattttcatctgcgtgatacctttcagtacgatttcccctaaccctccggctgcaatcatagcggcaatgaccaccatggagagcgacatcaggattgtctggtttataccggtcatgatagtgggcaatgccagcggtaattgtaccttgaataataattgcataggtgtcgcaccaaaagagcgcgaagcttctacaacattcttcggtacttgcttgatacccaggctggtcagacgcactacgggaggcatggcaaaaataatggtggcaaaggctcccggaacggttcccagcccgaaaaagagtacggcaggaatcagatagacgaaagcaggcatcgtttgcatcaggtcgaggataggatgcagaattttatcacatcgtttgctgtttgcgctccatattcccaagggaagtcccatgataagagcgatgatggtagacgaaagcaccaatgctaaagtctgcatggtttcgttccaaaatcccattccccaaatcagcaataatcctaaaatggtaaaaatgctgactccttttcccgatttataccaagccaggatggccagcaatgctattgttacataaaaaggtatccacatcaatatgttttggaacccatctatgaacccgcctattccaacattgatggcgtcgaaaagaggggcaaagttttctgtgagccagttgatggctgtttctatatattttcctatgtttatcataattcgatagcgttttgaataagttcattaatttcttctttatcttttccggtcatctctactacgatggacgatagaggaaccaagcctttcagttcgcgttcttcattcaccacataaatgggagaattggttttcgtgattaagggaagcagatcctcaatctttgtgtcctccgtaacggaatgtacttcactttgtacggcttcctggattgattttatacctttacgccgaagaatggcggcactttccaatgtaatctctcctatcagcttgtcattttcatctatcacaggaagcacggtaatatctctttctttcatctttctgatcagaacctcgggaccttctttacgcagacgggctacggcgggacgggttatcataatacttcctgccgttatgattttgctccggtccacattttctacaaatcttgccacatagtcattggccggttcagttaaaatttcttctgaagttccgacttgcaccacttctccatctctcataatggcaatgcggtcacccagtttaattgcttcgctcaaatcatgcgtgataaagacgatggtctttttcattttggactgcagtgccagcatttcatcttgcatttgtacgcggatcaatgggtccagagcggaaaaggcttcatccatcagtaatatttccggatcatttgccaaagcgcgtgccaatcccacacgttgctgcattccgccggaaagttgtccgaccatctgattctgatatcctttcagcccgactatttccatactcttcatggcttttttctcacgttcctgtttgggaactccttggagttcgagcccgaatgcaatattgcttaaaacactgcgatgaggtaacaaaccaaaattttggaacaccatagctatttcccggcggcgcatttccagcaattccttatcagatgcggcagtaatgtctgttccattaatcagtacttgtccttttgtgggtttgattaaccggtttatgcagcgcaataaagttgatttgccactgcccgacagtcccatgattacgaagaactctccttctttgattgtcagattggcgtttttaactgctacagtacaattagtcgcctttaaaatttcatttttgctttttctttctttcaacatccggaacgctttctgcttttccggaccgaaaacaagatacaagtcttttatttctattttgttcatagtctataatagtttaaattaattaagaatagggaggaattgacggaagtaaattgagatgtcatccggtatatttaacgaaacaaaatataaaaaggttcatcataagatgagttttattgatcagtaaatatgtttttttacagcttgttattgtttactccctacgggagtggttcagaaagtccgagattaaaaaaagctaatcagaaagcgttttctataaaacagaaattaagtattatccttttgtcgagcgttcattttattctatctttgtcacgcaaaacagaataaatatatggatagtattttaattattgatgatgaaccgcaaatacgcaaacttctttcgcgtatgatggaattggaaggttacgaagtattccaggcagccgattgccagtctacattgaaacaacttaagttacataatccccaagtggtgttgtgtgatgtgtttttgccggacggcaatggagtggatatggttacaaccatcaaaaaactctatccagaattggaggtgatacttttgaccgcccacggtaacattccggatggtgtgcaggcaatcaagaatggagcctttgattatatcaccaaaggggatgataataataaaattattccgttaatcagccgggctatggctcaggctaaaaagaatgtaggggaaaaagtgaaaacagaagagacccaaagtttctcttttgacgctataaaagggaagtcggagggtatgcaacaagccgtagcattggcccgaaaggtttcggcaacggatgttacagtcttgctgaccggagaaacaggcacggggaaagaggtctttgcacaagccatccatcgcaacagtcttcgcaaagagaatgcttttgtggctgtaaactgttctgcttttagcaaagatctgcttgaaagcgagatattcggtcataaagccggttcgtttaccggagcgatgaaagataagaaggggctgttcgaagtggccgataacggaaccatctttttggatgaaataggtgaaatggctttcgagctgcaagccaaattgcttcgtgtgctcgaagcgggagagtacatcaagataggcgacacgaaaccgacgaaagtgaatgtccgcgttatctccgccaccaatcgggacctgaaaaaagaaatagaacaaggtaatttccgtgaagatctttattatcgtctttctgtttttcagatacacctccctcctcttcgtgagcgcaaagaagacatcgaacttttggcggaaagctttatccaactcttttcaaagaaactggggaaacaggtggaagggatggctccggagttcttgaaagctttgaaagctgccgactggagaggaaatatccgtgaattgcgaaacgtgatagaacgcagcatgattgtctgcgacaaacagctcaccttacaagatcttcccattgaaatacagaatgcccggcaggaagattattccggcaagaattattcggagtttgaactggccgctatggaaaaacgtcatatcgctaaagttctgcaacatactaaaggaaacaagaccgaggcttcacgtttattgaaaataggtttgactactttatatagaaagatagaggaatacggcatttagttgttgcaggtcattgatcaaccctttcctgccctatggttaagtctttttatacggatgtattctatctccatagcctttggagttatctccataagctttggagttgactcccaaggttatggagttgactccaaagacttgcggagataaaacaaacaggaagaaaacccttaaccatagggcaggaaaggattagggatacggataagaccttttaatgacgaatccggttcccaagtcttttatgtattccttacggataaacagccccactcaaattctactgcttcacgaaagaccataggcagcattattgcaagatggtttcagcaaagatggctacggaatcaatacattccggatatagaaatgatccgtgactttcttcagcaagacaagagctttcgatatacttcggcatctttctccgagaaacagcatacaatcacttctccttcatagccatgtgccatttcttccccgatggcattcaatgcgatacgtgccgcttcttccttgggataatgatatacgccggtactgatacaggggaatgcaatgctttggatgccgttctctctcgctagtatgaaactggtatgatagcatgatgcaagtttttcggcttctccatgcgttcccccatgccatacgggtcctacggtatgaatcactttcctgcatggcaggttgtatgcatcggttatcttgctttcccccgtcggacaaccgcccaatgttttacattccgctaacaacgccgggcctgcagcccgatggatagctccatctacaccaccgccacccagcaacgagcagttggctgcatttacaatggcgtcgacttttaaagtagtgatatcggctacggtaacatttatcttcttcatttttcctttctgtttttctgtattaaaacctttatacaaagctatataataaattagggaattatgcagtttggcagcaaataaatcaattattctcctgttttgatattcttcccttttcattttgaaaagattttcttttgctccctcttttttcttgttgttatatctgtatataaatcaattacttatctcctgtttgccgataatggcacactattggcatatagcgtggcagttaacaatagtattaattaaaaaaaggaattatggatttattttcaatcggatttgtggtttgtaccttgagcggcatagcttgcttttggcttttctttaaatgcatagactggttcgagaagatctaaaaaaagaaaggagaaacaagttatgtacacagcattatttgtagttagtttgattatgttcggctatatgatgtatgttctcatcaagccggagaagttttaaaaaagtaagttaagaaataaagagttatgaatactgaagttttaggtgttatagcgcaaattgtcttaatggtagtgctcagctatcctttgggcaaatatatcgctaaagtttataaaggtgaaaagacttggtcggattttatgaagcccgttgaacgggttatgttcaaactgagtggtatcaatcccaatgaggagatgaactggaaacagtttttgagagccttgctggtggtaaatctattttggttcctttgggggatggtactgttggttacacaaggtgtgctgccgcttaacccggatggaaatgtcggtcagactgcgcatcaggcattcaatacttgtatcagtttcatggtgaactgcaacttgcaacattatagcggtgaaagtgggctgacttattttactcagctattcgtcatcatgctctttcagtttattactgccgctaccggtatggctgccatggcaggtataatgaaagcgctggctgcaaagactactcagactattggcaatttctggaactatttggtattaagttgtacccgtgtcctgttgcctctttcattggtcgtaggctttatcctgattgtgcaaggaactccgatgggctttgacggaaaaatgaaagtgaccaccatggaaggagctacacaatatgtatcacaaggccctacggcggctattgtccctatcaaacaattgggtactaatggtggtggttattttggtgtaaactcttctcatccattggagaaccctacctattttgccaatatggtggaatgttggtctatccttatcatacctatggcgatggcatttgcattcggtttctatctgaaacgtaaaaaattgggttatagtatatatggtgtcatgctgtttgcctatctggtaggagtttgtatcaatgtgagtcaggagatgggtggtaatccacgtattgacgaaatggggatagcgcaggataatggcgcgatggaaggtaaagaaatacgtttgggctcggccgccactgctttgtggagtattactactacggttacttccaatggttctgtcaatggtatgcacgattcaacaatgccgctttcgggtatgatggaaatgctgaacatgcagatcaacacatggtttggcggtgtaggtgtgggatggatgaactactttacatttattattatcgccgtgttcatcagtgggttgatggtaggccgtacaccggagttccttggtcataaagtagaagcacgtgaaatgaagattgcttccattgtggcactacttcatccgtttatcattttagttggtacggcattggctgcttatctgtttgttcatgcgcctgcatttgtggaaagtgaaggtggctggctgaacaatcccggatatcatggtctgagtgaaatgctttatgaatacacctcgtgtgccgccaataatggttccggttttgaaggactgggtgataacacatggttttggaactactcttgtggtattgtgctgatattaggacgttttgtcccgattgtaggtcaagtggccatagcaggtattctggctaagaaaaaatttattcccgaaagcgccggcacattgcaaaccgatacagtgacattcggtgtgatgacatttgcggttatttttattgttgccgcactatcattcttcccggtacatgcattaagcactattgccgagcacttgagtttataattctgataacagacaacgatattaatagaagatatgaaagataataaatcagcttctttatttcagaaggagcaagtcattgacagcataaaacaatcattcgtgaagttgaatccgcgagtgatgattaagaatccgattatgttcacggtagaggtttgtacagctattatgttcttggtgatgctctactctatcgttaatgattcacaaggctcatttatttataatttatgggttttcgtaatcctgttcatcaccttgttatttgctaattttgctgaagctattgccgaagcgcgcggaaaagcacaagccgatagcctgaggaagactcgtgaggaaacccctgccaaattgattgtgaacgggactttgaaaactgtcagtagttcccggttaaagaaaggtgatatttttgtatgcgaggcaggagatgtaattcctgccgatggcgagatcatcgaaggactggcgtctattgacgaaagtgccatcacaggcgaatccgctcctgtaatccgtgaagcaggcggtgacaagagttcagtaacaggaggtacaaaagtattgtccgatcagataaaagtaatggtaagcacccagccgggtgaaagtttcctggataagatgattgcattggtggaaggcgcatcccgccagaaaacaccgaatgaaattgcattgactatcctgttggcagcatttacattggtctttgtcattgtgtgtatcacccttaaaccgtttgccgattatacgggaactgtcattaccattgcttcttttctgtccttgtttgtctgcctcattcctaccactatcggaggattgctttcggctatcggtatcgccgggatggatcgtgctttgcgtgccaatgtcataaccaaatcgggtaaagcagtggaaacagccggagacatagatacgttgcttcttgataaaacaggaacaataactataggaaaccgtaaagctacccgtttttatccggctcagggagtggatgaacatgctttcatcgaagcctgcctgctctcatctgtatctgatgatactccggaaggcaaatctattattgaactgggacgtgaatcgggtttacggatgcgtaatttgaataccgatggtgctcatatgataaaatttaccgccgaaaccaaatgctcgggtattaacttgaaggatggaacagaaatccgtaaaggtgcatttgatgcgatccgcaagatagctttgtctgccggaaaccctttcccaaaagaaacggaagatatcattcaaaccattacaagtaatggaggtactccattggtggtaagtgtcaataagaaaattgccggagtaatagaattgcaggatatcataaaaccgggtattcaggaacgttttgaacgtttacgcaagatgggggtaaaaacagtcatggtgacgggagataacccattgaccgccaaatatattgcagagaaagccggagtagacgacttcatagccgaggctaaaccggaggataagatggagtatatcaagaaagagcaggctgccggcaaactggttgccatgatgggtgacggaacaaatgatgctcctgcccttgcccaagctaatgtgggggttgccatgaatagcggtacacaggctgccaaggaagcagggaatatggtggatttggataatgatcctaccaagctgatagagattgtcgagataggtaaacaattgctgatgacacgtggtacactgaccactttctccatagccaatgatgtggccaaatattttgccattgttcctgcattgttcatgctttccattccggaactggctgcattgaatattatggggctgcatagccctgagagtgctatcttgtctgcggttatattcaatgccatcattattcctattctgattccgctggcattgaaaggagttcagtacaaaccgataggagcttccgccttgcttcgtcgtaatcttttgatatatggcataggtggtgttattgctccttttgtgggtattaaattaatagatttagtagtaggattattcttttaacaagtaaacgacaatgaaaaattttataaagtcattcagacttaccttagtcttttgtgtgtttttctcagtatgctatatactagtcttatggattttcgctcaatttgccggacctaattccggcaatgccgaggtggtggaacttaacggaaaagtggtaggtgccgccaatgtgggacaatcatttacggaagatatctatttctggggacgtccttcatgtgccggagatggttatgatgcaaccagttcggccggtagcaataaaggccctaccaatgcagaatacttggctgaagtagaagcgcggattgatacatttttaaagcatcatccttacttgagccgtaaggaagtacctgccgaaatggtcacagccagcggttccgggctggatcctgacatcactccggcctgcgcatacgtgcaggtacaacgtgtggctaaagctcgcggaatgagtgaggaaactgtaaaagctattgtagataaagctgtggaaaaaccgtttatgggcatattcggtacagagaaggtgaatgtattaaaactgaatgctgctttagaaaaggcaaaataataaaaaatatatagtcattaaattaggaagatgtgcgtcatgaaaaagagaagtttcctggataccgagagcctgtcggctctagaagctgtggctatcattgtattgttctttgctttgataacatggattcttgatctttgacgtgcatcaccctattgaatgatgcatcttgattcagaaaaactcaaaatggatatttcctttcagacaataagaaggaaatagtataaatatgtaaaacacgaatattgattagtttaattttttaagatgaaaaagaatttgaaaaaagtggtcttggtgctggctctactgttgcctggagtgataaaagcacaagaatttaacgtaacggctaaggcggattttgtaagtgattacatttggcgtggcgcttaccagaattcaggattctctgtacagcctacattaggattatcttacggcaatctttctttgtctgcttgggggagtcagagcctgaccaagacagacggtgcacaagagtttgacatcaatttgagttataccattggcggtttaggtattacagtgaccgactattggtggaatggcatcaccatgccctacggggattataaacatgatcatcattttgaaggaacattagcttataatttcggcgagaactttcctctgaccttgagctggtctaccatgtttgcgggaggagacgataacaaagacggtgatcgtgcttattccacttatatcaatgcttcttataatattgcttgcccggcagaaattacgctcactccttccgttggtttcactccctggaaaggaatgtatgatgctgatggtgctgcttttacagatattgctttaaaagcttccaagaacattaatattacagatcatttttctttgcctttgtttgtacaggctattgtttcgccctcatttgacaaaacttatctgatagccggattaagtattgggttttaaatgtgtataaaaggaagtgtcaaaacgaaaccggactatccaatcgtcaactgtaggggcagggtttgcctgcccgaagacacaaagcaaactgttttcgggcgagcgaacctcgcccctacgaacgaaacgacagcattatccacgttttgacaacccttttttgttgtatagagtgacttatccttttttgagtcttgccggacgtggtatttttgttcaaagagttaccacgtggagaatggagtatggcaaaaactaaagatagttttgtatctctttaatgttattcaacttaataaagtgggagtgcgttacttctccttcatattgttcgtgtgcccaagtgacatgatgaggtacataggctgcataacctccgagttccaatatgggaataatatccgactttatcgagttacctatcatcagtaaattttctgccttacatcctaaatgatcaagcaatcttttataatccgcatttttcttgtcgctcattatttctatgtgacaaaagtattcttgtagtccggacgcagaaatctttcttttttgatcgaacaaatcacctttggtggccaatactaatttataattttcgtgcaaggctgatatgacttcttgcacaccgtccaataatgtgattggtctttgcagaagttcctgacctgatcggaggatttcttttacgagattgaggtctccttctccattagtaactttgcaaatggtttcaatcatgcaaagcagcattcctttcagtccataaccatagatatgcagattttttatttctgtcttgaacaattcttctgatacggaaggagccggtgaatatttcctcagaagatgacaaaatttgtgttccaactcttgaaaataaagttcattttcccaaagagtgtcatcggcatcaaaagcgataaattctattttatttttcatgttttattattagaataggaagagagagcaatcatatcataatgtattattttgtccgtcttttacgttctgtataaattcagcaacatttcgtccatccaccaagccatggtggacactgatggatataggaagcaaaagtttctttttttcttgtatcagcttacctgtggaaattttgggtatagaatctcctgtttgaattgaaccggcatgtttcatctcggaaaaggcaaaccagggcagagccgaataacggatgacatccgctcttgctgtgtccttggaaaaagaaagtccggtactgttttttactctatgtatttccttttctgcattttcaataaataaggaaagatctgtgtcatactcaaaaaatccaaagccaaaagttccgtcctctcttccgatagtgggcgaaatattgattttatcatattctactacttctccgttttctatacgtaatttgaatgcagtagtcgcattgatacatttcaataggaagtgcacagaataaagaaaaaaagaaacttccatatttttactttgttgatatatgcttgtgaaatcaacagtcgtggtaattccccaaaaagggtcatcgagagccgagaagaatttaaaatgctcttttctattccaattgtccaggttaataactcgcttcattttctatttactctgtttttcttttatgtgtattatttctgttacaactattttaacgataaaacgtattgttgcaaatatacaaaaagtattttaacagagatgttctttgtttgctttaaatccattttattatctcctgttctgtgttaaagttaagaatggataacagcaactattttaaaaggttattcaggactggtaatcaactatatgtctgttttgtttataagggaaagaattctattaaattcataagtcagttttttgtgtggataacaatgtaggtgatagaattggcaataaagtataaatcgctataaggataaaataatattttatttaatcaaaaacaaaagcaacaaatacctgtcgggcaaatttgttgcttctgtttattcaggaaggtcacatgacaaaagagtcttgtaattgagtttgttttattacatcaaatttttctgatggaatatccagaaaggctttgcacagtgtcattaatgccttttctctatcttgttcccgtaccagcactgaaagattgtgagtactgctgccatatgaaatcatgcataccggcatctctttcagcgtttctataattctggcttccaaccctgtatgcttttcccaatttagatcgccaataacgctgaccacagacatttctgtttccattcctatttccgcatacttatgtaattcacgatatatcaggcgtaatgtgtcgttgctacatttcacagccaatgaaacactcacattagaggaagtcgctaaatagacaggaaccttatatttctcgaacacatcaaatactttgccaataaatagataagaagtaagaacccccaatgaacgaagtttgacaaagaccacacctctgcgtgaaacagcagcttttacttttgttcctgttttttctgatgatatccgtaatgtatcttccggtgtttttatcaatacaatggccataccggcagtgcgcgccagcggaatacattccggatgaagcaatgcaatgccgctatcaataaaattctcggcttcaccgtatgtaagagtccgagtatgttccatacctcggaaacaaatttcatcagaacgtaaggatgttataatttcatccgcatggaatacagccccgataacagtggcataatactcatttcctatttgtgggaagaaatccacttcatcatatgcatttttacacaaacggctttgggtaataagaatggggacatcgggacagtctttcatcagttcttctacattttttttcacatactttatatccggtttccgatcaagccctagtcgcatgaaatgacatgagttcaagatgaagttctttttcgtacattcttctaaataatgtgacagaataagagaggatatcattgctccgtgagccataatctcatgatcgtcaatgatgttcggattttcattacataaacgggaaatttgatcgatgtgtacttttatttctttggcagcttctgctttctgcatttcggaggaaagaagattgtccaaccaatttccacaatcattctcgaaatcctgcaattgattcataaccttttcgatatcgagatggaataaagaaatagaaacagcttgcagcttttgggcaatgccggtaaaagtgtcgagcactataatagaacgttcgttcatgctaattacttcagtccgatgtttcagttcggtggcagatttaatattttctaaattatatactttcatttttgtattgcattttattcttttggagtttctttttcattttaacaggcaaatttccatattggaaagctatattcttactagtttcatctttattaatttgttaatcagttgtttcttattgtttgctcgctaccttttctataagttgatagcgttatactctgtataaatcaaaatcgatgccattacaaaaattgcacttttatctttcggctatttcatttcccattttagaaaaaaggctttcatattgaaaaagtataaactaattgacaagtatatatcatattgataataagatatttaagttggtggtatgacttttgtcatctaactgaaaaaaagaattatataaaaatgaaattgtatatcatatcaaacagactgcccgtgaaggctgtcgcagaacaagatacctttgttttctcacgtagtgaaggaggtctgacaacaggcctaaattccctacaaggcaattacgagaaacattgggtggggtggcccggaatctgtacagacaaagaggaagaaaaacaggatatctgtcaccggttggaggaaatgaatctccatcccatatttttatcccatgagcaatataagaactattatgagggatacagtaacagtaccctgtggcctttatgtcactatttttttgcctatacattatatagaaagagtttctggcaatcttaccaagaggttaacgctttgttttgtcgggaaatcatccgccttgtggaaccggatgattgggtctgggtacaagattatcagttgatgttacttccggaaatgctccgccaagagcttccccggttgcatatcggctatttccatcacattccgtttccatcttatgagttattccgaattctgcctgaacgtgccgaaatactgaaaggattgttaggagccgattttatcgcatttcatacacatgactatatgcgtcatttcatcagcgcggccgaacgggtactccatatggatttcagtttggatgaaacccggataggcaatcgcattgtgcgcgttgatgcacttccgatggggataaattatgacctttaccacaatgtgtcacaacaaaaaaatgtttggaaagctatagaacgaacccgtctcttgtttggcaaacataaacttatcctatcggtagaccgtttggattatagtaaaggtattttgcaccgtctttatggatttgcctcttttttggaacaccatcccgaatatcatggcaaggtaacactggctatggtcatagttccttcacgtgatcatgtaggcagttatgccgaattgaaaacccggattgacgaggaaataggttctatcaacggacgatattctacaatgaactggactccggtctgctatttttatcatggtttctcattcgaagaattggctgccatgtattttatagctgatattgcattagtcactcctttgcgtgacggaatgaacctggttgccaaagagtatgttgctgtcaagcaagacaatcccggtgtattggtcttaagtgaaatggccggtgccgctgtggaactgaccgacgccttgctggttaatcccaatgatacggagcagatagaaaatgccatttgccgggcattggaaatgccgtttgaagaacagaaagaacggatgcaccgtatgcagtctattgtatccgtacagactgtcaataaatgggctgccgattttgtaaatgaatggcaggaagtggcacacaaaaacaaaaccatgcttcttaagaagataggatcacagaatatgcaggaaattcagcatcaatacttacatgctaaaaagcgtttgattttattggattatgacgggacgctggtcccttttcagaaaaggccggaagatgcctctcctactccgcaattgctggatacattgcagaaactggctgccgaccccttgaatcatgtggtaataaacagcggacgtgaccattttactttagagaaatggttgggtgcactgcctctttcctttgcagccgaacatggggccttttataaagagaatggtgtatggcacaagaatgtacacgcgcaggaatggagccccggattactttctatattaaaattatttgtcagcaagactcctcgctcccatcttgaagtcaaagaaacggcacttgcctggcattatcgtgaggccgatgcatggttgggcagattacgtgcgcaacagttggtcaattccttgatatctatttgcttgaaacagaatttgcaaatcatgcaaggtaataaggtgatagaaataaaatctcccgaatttaccaaaggttcagaagtaaacaggcttttgcttgccacccgatatgattttatcctggcaatgggagatgataccacggatgatgatatgtttaaagccctgcctgttactgctgtgactgtaaagattggtacagcatccgagagtgcacgttacaatctgcccgtacagacagataccttgccgtttttacaacggatgacagataaaagcgtggtgaaagcagtcttgaaaagtggtttgaaagggcagctatcatcggctatagattttttaaaacggataataaaccactaacattacaaaaaaataaccatggacaatttgaattacggtgtaatcggtaattgctgcacagccgcactgatttccgaaaaaggaagtattgaatggctatgttttccaaattttgattcaccttctatttttgcagctcttctggatcgtgaaaaaggcgggacttttggttttgaagtttcagaagactatcacaccatccaatcgtatgttccccataccaatattctttccactacttttgtgtcagagcaagacgaatttgcggtagtcgactttatgccttgttatgagttatatgataataaggaatattatcgtccggctgaggtctatcgttatattcactggattaaaggtcgtccccgcattaaagtcaattaccatccggctcccgactatgctcgtggaaaagcattttttaatgtaacttcccggtatattgaaacctattcttcttctaacaacaaggacagacaatatctgtattcctctttgccgttgcaaggtattgtagaccatcaggaatttatattagagcaagatgaattttttcttctgtcatacaatgaaaaggtgattcctgttgatatagagcgtgagaaactggagtattgccgcacgttggtttattggttgaactggacggatcgtacaagaaagttcactatttacaacgatataatagagcgtagcttactcaccctgaagatgatgtccttttataatggcgcggtgttagcctctcttactaccagcctgcccgaagctgtgggagaagtacgcaattgggattatcgtttttgttggttgcgggatgcctccatgtccatagagactcttttcaagataggtcatgccgatgcagcccgcaaattcatgaaattcatacaatctacttttgttgccgagcatgacacttatcaaataatgtatggcattcgtggggaaaggaaattgactgaggttatactcgaccatctttcaggatataaaaactcccaaccggtgcgtatcggcaatgatgcttatcatcaaaggcagaatgattcattcggctatctgatggacttgatttaccaatattaccggttgatgccaggtacattggatgaaatagaagatatgtgggaaatggtgaaaagtattatgacgactgtgatggaagattggagaaagcctgataaaggaatttgggagatacggggcgaaggacagcatttcgtttcgtccaaagtgatgtgttgggttgctttggacagaggagcccgcatagcccgtattctgaataaatatgagaatagccgacgttgggaagaagaagctgatgcaattaaagcggatgttatgagaaacggatggaaggaagaaatacaaagtttttcacaagcatacggcaatctggatttggactcttctttactgttaatggaaccttatggatttatagatgctgatgatattcgttatcataaaacagtgaaagccgtcaagaaatccttgttacacaaagggttgatgtaccgctataatactcatgatgattttggctgtccttcttcggcctttaccatctgtacattttggctgattcgtgcactttatgtcatcggggaaaaagacgaagcacgctgtctgttcgatgaaattttgcaatattcaaaccatttgggtctgttcagtgaagatattgatttcgaaacaaaagaacaattgggtaatttcccacaagcttattctcatctggcactggtaaatactgctgtgttatttgcggaagaagataaaaggctaatctttaaataaggaaaaatttggagaatgactgataatccggtatcttcgtacaattaaaatcaggaaaatgcgtataacaaaaaaacggagcccaaggttaatcttgcagtctttagtaaaaaacggatgtccatatattattatatgtatatggtgtgtgttgtctggcggatgtgttcagaataaatcccaagattcattgaaaacattaaaaacagaaattcgacatattattaaagataagaaagcaactataggagtggctttgatattggatggagaagatacgctggccataaataatgccgaaaaatatcccatgatgagcgtttataagtttcatcaggcattggctgtatgtgattacctgcaaaaacggcatattccactttccacttccctatatcttgataaaaaatatttcaaaccggatacatacagccctttgcgtgataaatatccccaaggcaatttagaacttccgattagtgaacttttagtttatacaatgcagtcaagtgacaatgtagcctgtgatatcttattcgattatataggtggtgtaaacgtggtggatgaatacattcattcattgggaataaacgatgtttccataactgctaccgaagatgagatgcatcaagacatggatgattgttacaaaaactggacaacaccaatggaagcagccaatctattggaactttttatgactcaagatttcatgagaaatgaatatacagattttctaaagcatattatgatagagtgtgggacaggcaaagacagactgcctgctccccttcccgaaagtgaagtcaagataggacataagacaggaacttccgataagaatgaccggggagaatacattggcatcaatgacattggctttgtaattctacctgatggaagccgatacgtagtagctgtatttgtcaaagactcaaaagaaaatatggaaacgaatgctaaaataatctctgatatttcggctgctgtttaccgatatgccgggaatcgttaaaatagtgctgttttgcactatctatagagacaagaatgttataaatataatattatggattatcacatcattaaaatatctagaaataaaaagcaatatctggacttattattgcttggggatgaacaggaaacaatgatagaccggtatctggagcgtggtgacttgtttgtattggaagataatgggataaaagccgtgggcgttgtaacaaaagaaggtccggaaatttgtgaattgaagaatatagcggttacccctattgcccagcgacaaggatatggtagaaaactaataaactacctgataaaccattattcaaaagaatatactcagatgatagtgggaacaggagacgttcccggtgttcttgcattttataaaagttgcggctttgaatattctcattgtataaaaggttttttcacggagaactacgatcaccccattattgacaatgggattttactaaaagatatgatttatttgaaacgtaaaataggtttttaaaagagtggaaaaagatcaaatactgaaatatctcctaaatttaaacattgttttctatcgtttttcaatgaaataggtgtatctttgcactatgttaaaaactcgtatatcggatttggtatcgtaaacaatctgttctcataaatagattgtttattcgtgtattctcgggatattttttcgagagcaatttcatattactataattttattttttaattacacagggagtatggctatgctttcagtgtatgtttaatatattacgataatgaataatgacaacaatacaattctaggattcgatgtaaatttgatttgtgattttttcttaaatacggagcgacaaggacccggaagtcccgaagtaactcttaaagcattaagctttatagataatcttaccgacaaatcccttattgccgatctcggctgtggaacaggggggcagacaatgatcttggcacaacatgcgccggggaagattacaggcatcgactttttcccgggattcattgaacgtttcaacaagaatgccgagaaactgaatctccagaatagggtgaaaggcatagtcggttcgatggatgacctttcttttgaaaaggactctttggacttgatctggtcggaaggagccatttataatatcggctttgaacgaggcttgaaagagtggcgcaactatttgaaaccgggaggataccttgccgtttctgaaagtgtctggtttaccgatcaacgcccggcagaaattcatgatttctggatgagtgcttatacggaaatagatacggttcccaacaaagtagcccagatacaaaaagcaggatatattccggttgcgacattcattcttccggagaattgctggatagaacattattttgctcctcaagctaaagccgaggaaatattcagaagaaaacatgcaggaagcagaatcgtagaagaattgataacatccaatcatcatgaggctgagctatatagtaagtataaagcatattatggctatgcattctttatctgcaaaaaaggattctcactgagaaggtgagcgaatgacgatacaaagaagtataaaaagtgattaactcggtttaatagaataaatgattcaacttacttttagggagctttttcagtctccctaaaagtctttattataaacgagaatataaagcaaaatacttccaaaacggtgcagccatcaatgattgtttcacctcatcattcaataacaacgcttttacttcttcttcatccagcaaatgcactgtcagatcttcagtttcttccaaatgctgggtagagattcgttctacctccgtagccagataacaatgagtgatatttgtcatggtgctggcatttgctgaaatagtcataagttttgtccaatttccattgccataccctgtttcttcgtacaattcgcgttgggcagaaagcaaaggttcttctccggtttcacaaactccggcgcaaatttcataacgtgtttcttttattccgtgacggtattggcgtactaatacgaatttaccctctttggtgatagcaattacatttacccaatcaggatattccaaaatataatattcaggaatttcaactcctgtaggtagtttaacccggtcacggcgtgcggtcagccaagggcggcggataagatattcactttcaataatctcccattttctatcgtctgtgctcatataataagttttttgttttatattctacattataaaatttattcttgccagtggcttaattgattataccggcaaaggtacattaatccatttgcattaactataacactcccattctttttgaagaaattcaggaatgaattatgtaaatgatgaaaagactttagctaactttgcagacaatgataaattttattcagacagaatggaaaatagaataagtccggagtcttctctatggaatccttggcatggctgccataagctaagtacaggttgccggcattgttatgtatatcgcggagatagtaaacatgggaaagacagttccataataaccaaaaccggacaattcaatctgcccgtgcgacggaaaaaggataagacttacaagatcccttccggcaatcttgtctatacttgttttacctccgattttctgatagaagaagccgatgaatggcgtatagaagcatggaaaatgatgcgggaacgatacgatcttcatttcttgtttataactaaacgcatagaccggctcggccaatgtctgcctccggattggggggacgggtatgataatgttaccatttgttgcaccatggaaaatcaagacagagtggattaccgtcttcctctttataaagcagctcctgtaaagcataaaatcattatctgtgaaccgttgttgtccgctataaacttcaagggagaactcggtacatgggtagaacagattgtggtaggtggagaatcgggcaaagaagcgcgtatatgtaattatgactgggtattggacattcgtcggcaatgtatagaaaataatataagcttttggtttaaacaaaccggatacagattactaaaaggagaacgtgaatataaaatagcccgtcaatttcaacatacacaagctagaaaagcaggaataaactattctgggaaatctaacggcaataattatagtgattaagaaagtgtttcattttgaaagagtccccttttcattttggtaagctttagtctttgatgacacgcttatggcattgtagctaagccgtttgttttattggtatattctttgcctgttataaaaggactgatattaaatatgcggaaaattgttatattgccaatatgataaagtaacaaatggaagacagagaagaaagtgtacagcattttttagatttgattaaacgttcacggcgtggaaagtttaaaatctatatcggaatgatagccggtgtagggaaaagttatcgtatgctgcaagaagctcacgaaatgttggagaacggtgtagatgtacagataggttatattgaaacgcacggacgtgcaggaaccgttgctatgttggaaggattgcctgttatctctcggaaaaagatattttacaaaggtaaggaagtggaagaaatggatcttgatgccattcttcagttacatcccgaactggttatagtagatgaattggcacataccaacatcgagggcagccggaatgagaaacgttggcaagatgtaatggaattgttggatgccggtataaacgtaatttctgcagttaatatccagcatatagaaagtttgaatgaagacgtaaaaggcatagcaggtatagaggttaaggaacggattccggacaaggtgttgcaggatgcggatgaagtggtaaatatagaccttactgccgaagaactgataaaccggttgaaagccgggaaaatctatcgccctgaaaagattcagttggcactgaataacttttttaagacagagaatattcttcagttacgtgaactggcactaaaagaagtggcctttcgagtcgagaaaaaagttgaaaatgaaattgttacaggcgaaaagggcatccggcacgagaagtttttggcatgtatcagcagtaatgaacggactccccgacatatcatccgtaaagcggcacggcttgcttcccggtacaatacggtcttttttgccctttatgtacaaacgcctgccgaaagtacggaacgtattccattggcaacacagcggcatttacttaatcattttaaactggttaccgagttgggcggtgaagttatccaagtttcatcttccgatattatgggagaaataattaagacttgtcgtcaacgtggaattacaactgtctgtatggggcatcctgctttcaaaatgcccggtgcattattcagtctttccaaatatcgaaaatttctacactctttagcagaaatggacatagatttgattatacttgcataaaaaataaaagttatgaatataaagtcgaaactaaccctcgccatagggatattggtggcaatgattgtactgttggttgtactttctgttgtgaatttgcaaatactgactgccacggagcctgacagtccggcagcaggtcccggcttacagcgggctttattgtggatatatgttgttggtgccgcatgtatatgtattggtattggtatgtggttgcgtcttcccgcatcaattgataatcctattaaagagctgaccaacgctatacaggaaattgcaaaccataattatgagaaacgtttggaattgaacagcagcgaagaattttcagaagtatctaaaaatttcaaccgcatggccaaacgtctggaagattatcatgcaagtactttatccgatatgatggcatctaaaaaatatatggagactatcatcaacagtatcaacgagcctattatcggtttaaataatgatatggaaatcctgttcatcaatgatgaagcattgaatgtgatcaacctgaagcgtgaagaagttattaaacattctgcacaggatatttccctgcgcaatgatttgttgcgccgcctgattcgtgaattggtggaaattcctggggaaccagtcaaagacaaggaaaaagaaaagaaagaacctctgaagatttatgcggacaataaagagagttttttccaagtaaaatacatgagtatttcccaaccggggaaagatggggttactatggagaaaaaaggatatgtcattatgttgaagaatataacagaatttaaggaactggattcggccaagaccacatttatctctacaatctcacatgaattgaagactcctatctcggctattatgatgagtctgcaattattagaagaccagcgtatcggatctttaaatgaagaacaggaagatttggcaaacagtatcaaggaaaatagcgaacggctgcttaatatcaccggcgaattgctgaatatgacgcaggtagaatcaggaaaactacagttgaagcctaagataaccaaacctatagagttgatagaatatgcaataaaggcaaaccgtgtgcaagccgagaagttcaacattcaaatagaagtggagtaccctgaagacaaaataggtaaactgtttgtcgacagtgagaagatagcttgggtgctgaccaaccttctttccaacgccatccggtattcaccggaaaacggtcgtgtagtaataggggcacgtcagacagatgatggattcattgagatgtttgtacgggatttcgggaaagggattgatccacgttatcataaaagcatctttgaccattatttccgggttcccggaactaaagtacaaggaagcggcttaggtctgtctatttcccgggattttgtcgaggcccataatggtacgcttacagtagacagtaagctgggagaaggaagtacgtttgttatgcggttaaaagcatgatcacagcacaggggagagaatctttcaataagcgctctcccctgctgcttttgaaccaagccggaaaagcttactccagcctatgaacggtaatatcgctaaaatcctgtaataatgtcagtaacataccttcatcattgtatttcttggattttataaccattgtaacataataggtcgttacttctcccaacctcttttcgtccaattgataggaaacaatattgtactccttggaattgaatttcttggccatacggttcagtgtttctttattgtctgtagagaactccaccatggaacttttcatacctatacttttaaaaagatagctaagtgcctcaagaccaatcagcgtaaggattgttgctgagattcccccagccagtacataccggctccaatagccagaccgatgcccgaagtagcccaaattccggcagcggtagtaagcccgcgcacgatttgtttctgaaaaataatagtacccgctccaataaaaccgataccgctgacaacctgtgcggccacacgactcgggtccaggtctattccctccatcttcactacttccataaaaccatattgtgacacaatcataatgagagcacttcccagtgatactagaaaatgggtacggtaaccggcttctttggcacgatattccctatccagaccaataacagtacccaaagcgcctgccacaaacaatcttaaaataaaatcccacgtcatgctcatctttaagtcctccttgtttattcatcgtcctcatcatctgtcagttcgggcaaactcaacattcgttggctgtcttctgccggaagggcttctacctggcgtagtttacgctctatggcacgagtacgttttcccataacttcctctaactggtctcctgcattctgtagatttttctgtaccttttccagcaatcctccaaactttccgaattcggtctttactgcccctaacacattccatacttcgcttgttcgtttttgaatggccagcgtacggaatcccatttgcaaactattcaggatagctcccagggtggtaggacctgtaaccactatcttccagtctttttgcaacatttccaccaatgcggtccggcggatcacttctgcatagatattttcgaatggtagaaacataatggcaaaatctgttgtaaaaggtgggtctacatatttatcgtgaatgtcctttgccatttttttgattgtgatttccagttggcgggatgaagtttcaatcaatgcggcatctccggcttcgtatgcatcctgatattgctcatatacatctttgggaaatttggcatccacaggtaaatatacagtatcattactattttcctttcccggaagtttaatggcgaattccacaaattccgttgcattcttcttggttttgacattcgccgcatattgttccggactcagcatctggtccaataaagcccctaattgtacttctccgaatgtaccccgtgtcttcacattgcttaaaacttttttcaatcctcctacatcctgtgccagactcttcatctctcccaatcctttctgtacattctccagctgcgaacgtactatttcaaaggattgtcctatacgttcattcaatgttttctgtaatttttcttctaccatttgccgcatgtcatccaatcgtttttccgtacttttcaccaaggcttcctgttgcttgcccattgcttcaaatttttcccgttgcatttcattaccggtcagcaggtttttatgcaaagtatcctgcatattgcggatagaatagttcaaggtttgattcagttcattacgcagttcgcggatatttcttcccagctcgtcccggttttctttcatttcttcgcgtagcaatccttccagacgttcggtttgcagacgattgtttttagtaagtgcgattacaatattaattatcagcaggataataattacggttaataaaatttctgtcatgattcttgtttattttgagcaaatgtagcaaaaagccatgaatttaatcgttatatttgcagcgaatttggcaaaagcactccattaaatagtatatgaagtataaattattagttttagacctagacggaacgttgaccaatcaaaagaaagaggtaacggaacacacacgtcgtacacttatcgaagcgcaagagcgcggagtaaaaattgttttggcatcggggcgtcccacatacggtgtggctccactggccgagatcttagagttgcagaaatacgaaggttatatactttcgtataacggaggtgagatcatagactggaaaaccggtgagatgatgtacgagaatgtgctcgatccggatatattgccttacctgtataaatgtgccaccgacaatcattttgctatcgtcacttacgatggaaaatatgtattgactgaatatccggaagatgaatatgtattgaaagaagctattctgaatgtgatgactcccaagaaagtggatcattttctggaggcaataaaatttcctattgccaaatgtctgattgtaggtgaacctacgcggcttgcagtgcttgaaaaagaaatgtacgaacacttgaaagaccgtatgggcgtattccgttccgaaccttattttttggaattggttcctaaaggtattgataaagcacaatcactggccgtattgctaaaagaaatcggtatgacaaaagaagaaatgattgccgttggtgatggttttaacgatctttctatgatacaatatgccggattgggggtagcaatggccaatgctcaagaaatagtccgtcaaaacgccgactacatcaccctttctaacgaagaagatggtgtagccgcggtagtagagaaatttattctttaggtttccggtcaaagaaaggatttttagaggatgcactgacagggatggcataaacctgggtgcatccttccagccagttcagacgctgcgctgctagtccggccgagaacatgacccgtgtgtccaccctgttgtctgctgccgtggcacaagctgatccgatggcaatgcccacatcgacactattgagagcacacggcactccttctttgcgagacacgcaggtggcatatccacaatgaccacaattcaatccttgcgcctgttcgtgggtacctattaacaggacacattccgcattcagaatattttccgcatcgcgcagaaagaatttcattccatgctccgcaaccattttcaccatcatttccgataaaatattgatatcaccatccgtcaccatggctatttcaataatgtcaacaccttttcctttgggagcagtgcgcgctgccgtcatcatttgtcgggccacatgcaacacatgctcatggcggctttctctttcattcaatatcatataaatcttagttataagttagctgttgatacaaaattagtgaatatgaatgatataaggctcctgctttaagcctaaaaagtataaaaagagtcaccggctaaaaaaatatcaaaataaaaagagaaatatagtggataatccaattatttatcgttcctttgacaacggaatataaaaagatagttttttcgattgactcaattcatctcacacttgaaccgtttctattcttctaactaaatttttaaattcaaagtttacttaattatttatttatcaatttttattttatgaatttgtatattggaaaccttaactataatgttagggaaggtgatttgagaggtgtaatggaagagtatggaacagtagcttcagtaaaacttattactgaccgtgaaacacgtcgttctaaaggctttgcttttgtagaaatgcctaatgatgacgaagccaaagaagctatcaagcaattgaacggtgcagaatatgtaaaccgtactatggttgtaaaagaagcacttcctaaagcataaggaattagacattccacatcacataatggcgacagagtgaatctctatcgccattttttcttgaacagcttttgaaaatacatgaaaggcttatgaataaggaaacggacatctgtttttgtcagaatgtccgtttcttgtttggtatttgttctttagaaagccattgctccgaaggcggatttactccactcctatttcgtcaacaaacaaaaacgctttttcgccaggcatagaatgccatgcgggaagtttcggagtaacttctgctatgattttaatatagcgggcttttactttgtcaaaagagacagagtctttgcggctctgcattttagttcctttttccacaacgggaaaatcttcggaggctaccctgcggaaatttttcccgtcctcagaaacttccaccttcagacctgttgtaccaaagatagcatcgcctgtgttcaacattgtgtttacgaaaactgaagacacctccttaggctcaagtaaatcaagggtcacattcatatctgtcccgtagaaaccaatccaacgccctgagcgataattcatatccccatataatccgtctatcaaggtacttcctcctttaaaagtatatgatttatgaggaatggtgttcaaggtaaccggtttcattgtggctgcattaaaatgtatttcctccttacttatctgactggcaccctgcggacgaactgcaatggcttgtatgataacatctttatccacttgtatagtgtcggtatacaatggggattgcacatcgggaacgctgccgtccaatgtataatgtatttccgcgtcatcaaacgtctgaaaagcaatccgggcttttccttcatcgggagccggaacaatatcaatgttcacatcataaatgtcctggcgaaaatcataacctctatcccggtagatagccagcagagccggtaaacgtttcaagaaactgtcgaaatttttatgtgacggttccgtccattgaatctcggacaaggcagccatacggggaagaatttgccattccatcttcaaactgtcacgtgtccattctgtccatatgcatccttgggtaccgatgatatattttcgttcatcctctgccaattcattagaaacaggttcaaatgtatagacacgtccaaggcttttagtcccttttatccggttgtaagtaggattgctgaaataaagatactgaataggagtcataatcgcatcatggtgcagacgggcggcttcgataccacctttgacaccggtccatgacatcactgtggcacctggagccaatcctccctccaacatctcatcccagcccagcattttacgccctctgtcattgataactttgcctacctcggacatgaaataggtctgtaattggttctccttgctatgttttggtgtatctttcaaacccagttcccgaattttagcttgacatacagggcatttttcccaacgtactttcggacattcatctccaccaatatggatataaggagatggaaagatatccattatttcattcaatacatctttggcgaactgtaaagtccggtcgtttcctccacacagcacatctgggaataccccccatttacaaggaatctcgtatggacctcccgtacaacctaattccggataggaaaccaaagctcccatcatatgtcccggaaggtcaacttcgggaattacagtaataaaacggtcagcggcatacttgacaatttcttttgcttcttcctgtgtataaaaaccgctatgaggagtttcatcgtaggtctgggtttcacggtcaatcaatgtacgcggacgcatcgaacctatttccgtaagtttgggatatttcttgatttcaattctccagccttggtcttcggtcagatgccaatgaaaataattgatattgtgcagtgccagcatatcaatgatttgtttcagataagaaaccggaaaataatggcggcccacgtctaccatgaaaccacgataaccgaaacgaggatagtcattaacagttcccaccgggatggcagcggatacctgtttgtttttggtcaacggcaaagccttgtagagcgtttgtattccataaaatactcccgactcacttcctccattcaaatggatgttttcagaagttacctccagttgatacccctctttgttggtaatggaaccgtcaaccgccaaaatgatggagttcttccttgcggcttcagttgttgtccgaacagtaattcccgttgcctctttaatataggaagctaaaaattctgccgtccgttgcaacttttcattgccttccggataaacaataccggtttgcggattaataacaaaagggtgggcttgaatgtcttgacttacttcttggggctgcggaatgacattcagatttccgatttctgtttttgtaggggaacatgcggacagccccaataccatccacattcccactcctgcccattgcatcagttgttttttcatagtggaaaatttataattgcaagggcaaagatacaaaatccgactttatctgccagtatgccttaaccgaatcttgctttttttcagcaatgtttttcctcctataatcagagttacggcagtaatcaccatcaaaatgcccagaataatgcgcggtgtcagctgctctccaaaaatcagtactccgaagaataaagctgtaacaggctccaaagcacccagaatagcagtgggggtggaaccaatgtagtgtatggcctttgtcatggtcaccaacgaaataacagtaggaaaaacagccagtgaaactgcgttcacccataacaagggtgtagggataggctgtaatcctgtacagaacttcaatcgcaccacataaacagacaggccgaaaagcaggacatagaaagtaagcttggctataggcatatccttcagggaagaacggtttacgccaactatatagatagcataagacaaggatgataaaaagacaaaagtaatcccgaccaggctgagtgtctgtcctcccggacttttacagagcaaggaaattcccacaaaggccagcgctatggaaaacatagtgaccggcgatactttttccttaaatactacagccataataatagctaccagtaccgggtagacaaacagtatggtggatgcgataccggcatccatgtagttataactcataaagagaaacagggaagagaatgagaacagcagtcccatgatgcaaagtggcagcacatccgctttcttaatggcaaaagattgcttttgcatcttcatcatgatacctagtacaactatagccagtgcatagcgataaaataataccgagtctacgctcattcctgcactataaagaggaagggtgaacagtgggttcatgccgtagctggctgctgcgattgccccaaggagaaatcctttagtcttgttgttagtcatcgtttttattacacgctttaaaatcggcgcgaaattagatatttgtcagcaataaacaaaggaaaaatgctttattctttcactctgacatctatttattttaattatacctaatcaacaaatataaaagaatttatatcacctgtagcagctgaaaaattatatgaaatgattgaacggacacggacagaaagggaaatgcaggtttgttctttctgtccgtgttccactatggattagctcagtttatgaataaccaatcccgaacgaagtttcggttcaaaccaagttgttttgggcggcatgatattgccggtatcggcaatatccattaattgtttcatagaaacagggtaaagggccaaagccactttcatttcaccgctgtccacacgcttctttaattcctccaggccacggataccacctacaaagtcaatccgtttgtcggaacgaagatccttgattcccaatatttcatccaatatcaagttggaagaaatagtcacgtccaatactccgataggatcattgtcatcgtatgtgcccggttttgctgtcaagctgtaccatttaccgtccagatagagagagaaattgtgaagagcctgtggtctatagacctcagttcctttctcttctaccacaaaattcttgctgacagcggtcaggaattgttccggagacagcccgttcaagtcttttacaacacggttgtaatcaataatagtcagctggttggccgggaaacatacagccataaagtaattgtactcctcatttccctgatggtttgcattttgctgcgctttttcggcgcctaccagggctgcggcagccgagcgatgatgaccatcggcaatataaagagccggcatggcttcgaaagcttttgtgatagcttttatatcttcttctttgtcgatcacccagaatgaatgtccgaagccgtcacccggagcgataaaatcatattccggccgttgtgaagtatatttcttaacgatagcatccaattccgcattatccgggtaagcaaagaataccggttctatattggcattatttacgcggacatgtttcatgcggtcttcctccttgtcacgacgggtcagttcatgttttttgatgaccccgttcatataatcgggaacatacgctcctaccaccagtccatattgggtcttgccattcatggtttgtgcatatacataataattttctttttcatcttgcaccaaccagcccttgtcctgaaacatctggaaattttcggcagccttctcatatactttaggatcatgttcgtctgttccggcagggaaatcaatttccggttttataatatgataaagtgacttttcattacctttcgcttcctcgcgtgcttcttcagaattcagtacgtcgtatggacgtgaagctacttgttctaccaattctttcggagggcggatgcctttgaagggttttattattgccataaaataaaggtattagattttacttgcaggggcgaattgcattcgcccgaaaacataagctatatgcatccggtcggattcaatccgcccctgcggttattggattacttatttatttactctgaatttttcacaaccatctttcaggaagcctactatttgtctggcagcagcgatacctgcgttgatatttgcttcagccgtctgggcccccatctttttcggtgtagcgaaataacggccggcaaatttttccgagaactctgcatgggcaaccggcatgatatcagtaacatactttaagtcggtgcgttcttccatcagtttgattaattccgcttcattgatcacttccttacgggcagtatttaccaatactcctcctttaggcatcttgttgaccaattcatagttgatggaatttttagtttcagccgtagcaggaatatgcagggacactatattacaagcagcatacagttcctcagcagaagaaacagctttcacaccgtctttttcgataacttctttcgggcagaaagcgtcaaaagcataaatatccatgccaaaacctttagcgatacgagccacattgcgacctacattgccgtatgcatggatacctaacttcttgcccatcagttcagtacccgaagtcccgttatagaaattgcggacagccatcaccatcatgccaaaagccagttcggctactgcattggagttctgtcccggagtattcataacacacacattgtgtgccgtagcagccgccaaatccacgttatcataacctgctcctgcacgtactacgattttcagttcttttgccgcatccaatacttcggcatcaataatatcactgcggataatgattgcgttaacgtcctttacagcttccagtagtttagctttttcaccatatttttccagcaataccagttcataacctgctgcttctatttctttacggataccgtctactgcaacttttgcaaacggcttgtctgttgctactaatactttcatggtcttattgtattaaaaaggttcaccacagattatcacggattatcacagattccatttattgttcctatctgtgcaattcgtataatctgtggtgaacataattattaatgaagtttctcaaattcctgcatgcagtcaatcaaagcctgaacgctttccttcggcatagcgttgtagcaagatgcacggaaaccgcctacagaacggtgtcccttaatacccaccatacctttttctgtggcaaatttcaagaaatcggcttccaggtctttgtattcgtcattcattacaaagcaaatgttcatataagagcggtcggctttatccgttactgtgccacggaacattttgttacggtctatttcagcatacagcatgtctgccttctctttagcacgtttctgcatttctgctacaccaccgttggcttttatccagcgtaaagtctgcaaagcggcataaataggaagtacaggaggtgtgttgaacatagagccgccgtcaatgtgagtctgataattcagcatagtaggaatatagcgtgataccttgcccacagcatcgttctttacaataacgaaagtgacaccggccggagccaaattcttctgcgcaccgccatagatacaaatatatttagaaacgtcgataggacgagagaaaatatcagatgacatatcagcaatcataggaaccggagaatccagatcttcatgaagttctgttccatagattgtgttattcgttgtgacgtggaaataatctgcatcggcgggaaccgtataatttttgggaatataggtataggtcgcttcagcggaagatgccacttctactacctcgccgaaagccttggcttctttcatcgcttttttggcccatacgcctgtgttcaggtaagcagcttttttttcgaggaagttgaaaggtatcatacagaattccaagctggctccaccccccaagaatagtaccgagtacccttccgggatgttcaacagttccttaaacaaagcaacagcttcgtctactacaggctgaaaatctttagcacggtgactgatttccatgatggaaaggcctgacccattaaaatcaagaacggcttgtgctgtcttctcaattacctcgcgaggcaagatagatggtcccgcattgaaattatgctttttcatttgacgtttgttttggttatacaatttgtttatatcttacattgggcgaaattacacattattttcagttttccaaaaaaatcgctaataaatttacgaatttccgcataattttctttcaaattagttaaatctgattttttatgctttcattttgcaactacatccctagtaaacaatgatctaaagcataaaaaaaatatctttttgaattattctttaatcattttatttcgagaattgacaaattgtcattatttagcttcttcaataagtgtttttatgccctttatcttctcatttcgtattaaattcaaagtttgttttatctttttgcgagatacggctgcaaaagaatagtggtcttttacatcaatccgtcctatttcgtctttattaaggtttccttttttaaagagaaatcccacaatatctatcttattgattttatctttcttgccttttcctatatataatgtcacatattcgggtaaagaaggtttgggggtgacttcgggtaaaatgaactcctccggctcatcggttatatatgcgggcactgtttcttcggcatgaaggataacataagaattaccttcggcttcccagcgggcggtacgtccgttgcggtgaatgtatccgtcttcattggcaggcagatgataatgtactacattctctatttcggggatatccagtccgcgagcggccagatcggtagaaataagcacatggcaacttccgttgcggaatttatatagggagcgttcgcggtcatcctgttccatgccgccatgaaaaatgccacattgaaacttctgggattgaagatacttccctacccgttccacactttcacggtgattacagaaaaccaatgtcgattggcttcccaaggtacaaagcaatttatataaggtttcaagtttgtctttttccggagacagtaccttatataaatgcagacggtgggtaagctgctcttccggatttaaaaaattcaatttaatggtcttgtccagccccgtaaactgcggaatctcttccgcatcggtagccgacaacagaaaacggcgttgcaagttgggcaactgtcctatgacagtcgccatctcttcctggaagccaaactccaggcatttgtcaaattcatcgattaccagagttgtgaccgtatctgcatcaaaattctgtttggaaagatgatcattcatacggcccggagtaccgatgataactgatggctgcacccctttgatggtacggtgctcttccatggccggtcgtcctccataacaacttacagccttgaagggtgtgttcatggatttaaatacctggtctatttgtaaagccagttcccgggaaggaaccagcactatagcctgtacgcctgttataccaggcttcaaactctgcaccaaaggcaacagataagctaacgtcttgccggatcccgtaggagacaataatattaggtcttttccctctttccaagcattgatggacgcctcttgcatcgggttcagccgctcaattttcaaattggctagtatgttctctatcatattcattttcgttttatacaaaagtaaagaaaaagcccgataaaagttcacttttaccgggcttattttcattattaataaaaggatatcctgatattatcctccgaagttgtcgtacatgatagaagaaggctcaacacccagactatccagcatcttaacaactgcattagacatcgggccggggccacacatgtagtattcaatatcttcgggagcttcatgatccttcagataagtttcatacatcacattgtgaacgaaacctgcggtatacttcacgcctgctgcatcggctgcgggatccggacggtccaaagccagatggaagtggaagttcgggaagtctttttccaattgttggaaatcttgcagatagaatacttcgttcaatgcacgcgcaccatagaaatagtgaagttcacggtcggtagtgtgcagtgtcttggtcatgtgcataatctgcgcacgcaacggagccataccggcaccaccacctacccaaatcatttccttcttagaattgaagatcgggtggaagtctccgtaaggaccactcatcgttaccttgtcacccggtttcagcgtgaaaatgtaagatgaagcgatacccggattcacatccataaagccgggaccctgatctttcggtttgaacggaggagtagcgatacgtactgtcagcatgatacggtcgccctcggcaggatagttggccatagagtaagcacggatggtttcttccgtattcttgcatttcaagccgaacaggccgaatttttcccatgcgggcagatactccggaccgataaggtctttgtcaatatccttgttgtagtccatttcaaatttaggaatcttaatctgggcgtatgaacccggaacaaagtccatgtgttcacctttcggcaaagccacaataaactctttgatgaaagtggcaacgttcttgttgctgattacttcgcattcccattccttaacacccattacagattcatcaatcttgatgcccaggtctccttttactttcacctggcaacccagacgccaatgatcctgttgttgtttacggctgaaatgtcctttttcagaaggaagaatctcaccaccgccttctacaacctggcatttacattgaccgcaagaacctttaccaccacaagccgatgacaggtatataccattaacagacagggtgttcagcaaagttgaaccttgttctacttccagttctttctctccattgatagttatctttactttgccgctcggagtaagatactgcttagctaccagcaaaataacaacgagcagaaggataattccaaggaatactccaatactagctaatattaaattcatatccattgtcttattcctttccttttagattttcaaaccagagaaacacataaatgccattgccatcaaacctacagtgatgaaagtgatacccagacctttcaaaggagcgggaacatcagagtaagccattttttcacggatagcagccagaccgataatagccagtgcccaaccgatacctgagcccaaagcgtaagttgttgcctcgccaatgttgatgaaatgacgttgctgcataaacagtgaagcacccatgatagcacagtttacagcaatcagcggaaggaagatacccaatgaagcatagagtgacgggctgaaacgttcaaccgccatttccaccaactgaacgataccggcgataacggcaataaacaggataaagctcaagaaactgaggtctactccttctaccagcgcattaggtgccagtacgtaattttccagcatatagttcaccggcaaagttacaatcaacacgaaagtaacggctgcacccagacctacggctgtctttacgttcttcgatactgccaggtaagaacacatccccaggaagtatgcgaaaatcatattgtccacaaagatggactttacaaacaaacttaaatattccatattcttttcgttttataacggggattaattattactttcctgcaattctttgtgttttgcacgttggtaccaaatgatacaagcacagataatcaacgccataggaggcatcaacatcaagccgttgttcaggtagcccaagtcataaacagcctgcgggataacctggaagccaaacaatgtaccggctcccagcagttcacggaagaatgccacgataatcaggattttggcataacccaatccgttaccgataccatccaggaatgattcccaaggaccgttcatcatagcaaacgcttccagacgtcccatcaggatacagtttgtaataatcaaacctacatatacagaaagctgcacacttacatcgtatgcgaacgctttcaaaatttcactaacgatagttaccaatgcggcaacaaccaccaactggacgatgatacggatacggttgggaatggtgttacgcaacaaggagataacgaagttcgagaaggctgtaataatggttacggaaagacccatcacgatagccggttccagctgagccgttacagccagtgcagaacagataccgagcacctgtacggtgacagggttattcaaacccagcggagttaaaagaacttctctattctttttagaaaataatgcgctcatattctatttaccctcctcttatttattagttaaaaatgaattgtacatgctcaggcaatccttaatcatcgcatctacacccttagaagtgatagtaccacctgagataccgtctacctgataatcgggttttgccaccttgccgtgtttttcaacacccaaagctacagtaccgttttccattacatgtttgcccaagaactgatcctggaacttagtagtggtgatttctgcacccagacccggagtttctccttgatgagagaagtaaacgccgtatacagtgtctttgtcatcattcaatgcgatgtatccccagataggtccccaaagaccggcaccataaataggcagcacatatttggtctgaccatccacgtcgcaaacgaatacatgaagacgtccgttagcgatttcacctttataagaagtctggaaagcagcatcgttctttaccaaagaaccgtctgcctgcatcaaatcgtcttctttcacatatttatcatattctgcattcacatcttttacgtcataaacgttcaaagctgccagaatttgtttctttgtgtcctgttctacattctggtactgtttttctttcagagaagaagacacgaatgccaacaggaatgctacgataacaaccattatcgaagcatagatgatagtataactattactattagtattcataatgtccgatattttagttgttagttgattttaatctgttttcgcgggctgtgatgttcttctgtacgatacagtagtcaatcagcggagcgaagatgttcatcagcaggatggcaagcatcataccttcgggataacccggattcaacacacggataacgatagccatcacaccgatcaggaagccgtagatgaacttacccttttccgtacgtgcggaagtcacagggtcggtagccatgaacacggcgccgaagcagaaaccgcccaatacgatgtgttcgtaccaaggcaactgagccatcatgttatctgtagagccgaatacattgaagatcaatcccatcacgataccaccggcaaagacagagaacatggtcttccaacttgccacgcctgtccacaacaggatgatggcacccagtgcgatagcgataacgctggtttcaccgatagaacccggaatcaaacctacaaccatatcccacatggtagcgggagtaccgttcacattaatcagttcgcttgcacccggagcggctgtagcagcctgtcccaacatcgtagcgccggtaaaaccgtccactacctgtccgccaccgataccgaaaatgctgtcagtgcttacccaaacggcatcaccggacattttggtaggataagcgaagaacaagaaagcacgggtaatcaatgcagggttgaagatattcatacctgtaccgccgaatacttccttagcgaagataacagagaatgctgtagcgacagccagaatccacaacggacattccacaggaacgatcatcgggatcaacagaccggataccaggaaaccttcctgaatttcttcgttcttccattgtgccaccacaaattcgattcccagaccgactacgtatgacacgataatcttaggcagaacagccaggaaaccataaatgaacttttcaaagaaacctgcctcctggcctacagccaagaagtgctggtaacctacgttgtacataccgaacaacagggccggtatcaacgcaataaccaccattgacatgatacgcttgctgtcaatcgcatcatgaatgtgaactcctgttttcgaagtgctgttgggtacgaacaagaatgtttcgaaaccgtcgaacaccgaacgaaacgcgtggagtttgccgccctcttcaaagtttggctttatcttgtcgagataatttcttaacgctttcattaacttttaattcttagtttttaattatttagcacatttccttgcgaagcatgtccaagccctgacgcacgatgcgttgcaattccaatttggaagagtcaacgaattcacatacagcgaagtcttcgggagccacttcgtaaataccaagtgcttccatgcggtcaatatcgccggcaatgatagctttaattaaatattcggggaaaatgctcatcgggaatactttgtcatactcgccggacatgatcatgtggcgttcgccacctttgatacgggcatccagtgtgtattccttgttaccgcacaaccagctgaaataactgcggttggcactgtactgatcggtacgcggcatgataaagcccaggaattcgtgccggtcatccccttcgggaatcacagtaagacttgtagcgtgcgcacccaggaatccgtttggcttcaccaaagttccggtcagcacgttaccgttaatgtagcgtaagtttttacctccgttcacacgtcctgcaaaaatatctgtcagcaaggctcctactttcagcttgcaataagccggtttcttcacttccgaaccggtcagggcgatagtacgggtaaggtctacgcgacctgtgttgaacaggcgtccgatgaagatcacttcttccgcacggagcgtccaaacagtttcgcctttgttgataggactgatgtggttaatctgaacgcctacgtttccggcggggttaggaccgtcgaaggcagttacagttacatttttggcgttggtcagtgcagggctcttctgctctacgctgatattcagatacgtctttgccatctttgccagtgcgtccagaccagtctggaaatctttttcctggcctttcagaacaaattcgaaatcagcagccaatgggttagtgtcaaatgcagaaacgaagatgcctttcggcttggcattcggatcagccaccacgatgtaggggcgctggataatgaatgaaaaaagtccggcttccagcagggcggcttttacctgctcgcctgtcagagtcgaaacatccttctttccaaactcttcgtagtcttgctcctttgcagctgcaatggagatgcttaagactttacgacgttcgcctctctccacgctggtaacgacaccgcttaccggagatacgaacttcacttcggggtggttcttgtcaacaaacaatgttcccccggccgtcacatattcctgttccttgaccacgactttaggagtcacgccatgaaaatcatcgggcactatcgcatagatgtccggctgcttcacgtcaaagaactcctgagcaggtttccctttcaggttgatgttcaagcctttgtgtaatttaatcacatttgccatattgggttataaaaaatggtttttaaatttgagcgcaaaagtacagaaaaaaaatgtgaaaaaagaaagaaatggtgcttattatggaaaaaattctgtaataatagaaacctttctgaatgtatgtgcaaactcaggcagatgctcactttttttttagaacacaaatgacgcgaatggcataaatttatcttgatttttaatttatgtcattcgcgtcatttgtgtttcattccggaaacacttacagtttgacggtcttcactttgccgggaatgacggtcaggtgtaccgtaccgttgttttctatatccacctcctggtagcgggcttccaccatcactttcccgtccagtgccatcaccccccaccggcaggcgctctcttcaaaagcacaataaacgcccacaggaggaagaatctttctgtatttgggaggaacgatgatacgttcccccagtttcaagccccatttcatgcccatacggtacggaagggcatctcttatctcctccagcctcttccgccttttcgcttcctcgttccttctcttctgccggtccgtttcctccgcccgctgtccggcttcctctttcagcttctttacagccgtgtcgaagtcctgctcaccgggttcgggaaggttagcggcaatgtaccgcttcctctttcctttttccacatggtaataccttccggccccgtccatcaccacgatgctccggtcggccagacggccgcagcaccaataaacttcctcgtcatcccctgccaacaagcaggcgaacacatcaaacaccgtggaccatacggaatccaccagcttgcaggacttcggtacgcgataatccggtatcttcaagtaatattcataaaagcagatgctgtctttatgcagcccgttcatggaagcgtatgctttttttgtacggctatggaaagtctcccctaccctcagcaattccacaccgccataggaaaacaccaccggcaataaaatccccatggggcgatgaactacgtacaagcggtctatggtttccacagcaacagtgcggataataagaaaaatcatcccggcaaaggcgtggaacgttccggcaaggagccggtacgagcttgtttcctctcgtaggacgaggaaacgttgatacggagggagattaaaaattgagaatttaaagatggcagttcataccggctctcccaagcagggacagtggggacagcagggacagaccccaatttctcacacacgcacgcgcgatataattaggtgggaaaatcatctttcccctgccttcccacaggattatgtccggccggaacttctgaaaaaaaacgcacgacagggaggataaccgaaagcaccgtcctcatcagactcaaacgtttcaccaaataagaagtatcggtaagtgtggacggcaagggaatatatcatcccacttatcctccctttataggtacacgcatgcgtgtgtgaggaaaaaagggggtgtccccactgtccccgtgtccccgtaaactccctgcaatccgccaaggggtcagaagagatcacaccgcacggacgtgaagttatctttacaatgttcaaaggaactagccgtcacccgccacaagattacaaaaactttggtacaagattccgcggatcttgtaccaagtttcaccggatattgcagcagtgtgcacctcttttcttcggactctgtttcctttctacatttcattcttctactatccacttttcgatattgcgggtttcagcactgaagttcacccctatttaaaagagcttccgtccgtccgaagcaaagggaagcgcgtaatgcttgtcatgaatctgttgcaaagcctcctcggccgtgccgtccagcttgtattccatcacacagataagcttgtcagtatgcaggacaaggtcaatgagccctttgcttgtatgatattccacttgggtgtaaaagccgataagcttgaatacgatgaaaagcacattctcgtaatgcagttcctgctcgcggatcacttcgtaggtagtatccgcaaagaaactttgcagacggcggaagaaggagtcataatcaccgaaacgcacctcacggacaaatttctgaatctcaaagggagattccaccttatttacgttcgcgtaaaaagggagcaggaaacgtacaaacccctcttccacttcccggttcggaaaacctaaacggtacattccaaattcttcatcatatccctttatagtgaggtgtccgctctgatagagcaccggaatgggattggtggattccgaatctatactgttcagcacctgggagtccgtttcctcgtgggccatccgttccaagtcgtaatgatgcttcttcagcagtttcaccagataggtaggagtacccgtctcgaaccaataactgccgaattccttatatttgaacgtattgagcaaactaaacggattgcacatgccgatagaatgatgtgtaaagtgatagccgtcataatatgctttcaaatcgtcacaaagcttgtcgtatgacactcctctcgcttcagcaaactcatgcagttcggcatccagattatcatgcagaatcttatccagactctccggagtatcatacttctcgatgttcagatccagatgcagaacaggatatctgatccagtccttttccagcttctccatcgccagaccttcaaacaactccttcttaccttgaaagtaagcttccaaggtagagatgagcagggtctttccgaaacgtcgcggacggctcaggaagtagtaacttccggtctttaccatctggtacacccaggccgttttatcaatatagaaataaccgtcctgacggattttctcgaaattctagattccgatgggatatattttattgctcatacatttttcaatgctttatcatgatacttatatcacttcaccattcattatcattttttgctgtagcattctgaaaaaagtctttttcccgaatgagcactgctttataaagaaattcgtacacgccgttacagcttatcaatttcttctggcgaaagtccggcaatccggacaatatccgctatggaaaaaccgttctctttcagtttacgggcgatctccaaacgtccctccaaacgtccttccgcgacagcctgttcacggatatcattttccacaatacggctcacgttataacggtccaccgccttatcataagcgatacggtcaccctcagacaggtgagccttggcggcaaggcggtcaagatggctgaaaacctgttctttcagcgcatcgggcattctgttccagttgttcatattcttcagtgcatacattagtttatcggataaagtagaacattcgtccagttccttcgtaaaataaggaaactggagataaatctgacggaaattccggttcaccacacgaccgctgtcccggtcggaaaccaccgtgtcggtacggaatttgctttccagaccatcctccttgaaattcatcaggaaaatgccgtacacggcaggaagcctgtaacggagtgtcgggaacacatacctctttagaggacggattctccatctggcggctcaccgcacggcacacataatagagcgtacggtccaggaaatggctatgccaacgattctgcatctccactatgatgtactcgccgtagaggtacggcagtaaaggtcatagatgatgcccttgtcgtgaatattctccgaacggtcctccttgtccagaaacgtcaggtcttcaatgtgatgctcacccgacagcagttcgttaagcaggattatcagcagatccttgctggcgggctggccgaagattatcttgaagccgagatccgtgaaagggtttacaaagcgggatgacataataaagatgattttatggtttctgaccgcaaagaaacgaattctatctgtaaattactatgaatgagcgctttttattatatcagagatctaacttgactttggggttctcttacgaagagattcccattttttattatacctaaatatgcaagaaacacctttctgcaagcctattatacaataactcatcactgcaacaaacctattttccctattatgtttctttttgcaagagagaagtaaaaatgacagacatacacaatgccttagaataaaaaaacggactgtacagtctttcttttctgtacagtccgcttaaattatatacaatgtagagagataacgcttattcttcgtcagcaaacatcgggtcccatgccggaagacggattggtttctgttttaaaatatccagcaccttggcaggaacatatttcttttctgccaccacacggaacatatattcatcaaaccatttatctgtcatgataaggtgtcctctgtatccactggcactgccccaactgttttccaccatccattttttcggctttcccgctttatccaagtccaccgccatcaaggtcatggcatggctgctgccactggagaaagtttggatacgttgtttcttgtccatgccgaaagtagttcccatcaatgattcgtaatcataattatcagggtccagcaagccacgtttactatcaaggaacttgcctacatcacaagaaaaatacatcatggtactgtccttgatggaagctatggctatttctttaatatcctctatcggcaagtttacataagtccaattcttgccatcataacggtgacggtcaaaatctatttcataacatttataaaactcgcggctgggatcattcatcagcattacatagttattggtcaaatcatttcccaaaaactctttatagaaagacaccggagtatattctttcgcttccccacccttcagactccatgtaaaggtggaaacaggttcgccaagggtcagcaccaacatacgataaaccgttcccagcatttctgtctttttcttttccagttcggccggcttcgctccggtagcggcggcttcgcgtagttgtaaaccaaattccttcagtttcagtcctatcagactactcatctttccggtattctcactgctgaaagtttccaccattgcactcttggggaccagtccgtatttctctataatatccgatactcctgtgaattgtcccccatcgcttaagggatgcttgaacagccattccaccattttatcgtccatgggctttccactggtatcaatgattccctgtaagaataagtttgctttttctaattggtcgtagaaaaagcagtagttctgtgagaactccatctcatccagtccgtatttggcaatcatctggctgcggagcacgttcagtccggtaaaaagccagcaacgaccggaagattgttggtcggttattcccttggatagcaccttgtgtgaaaactccgtatcaaaatcggcacggttctcctggttcaatgccaacgtgttgatacttgttccgcctaaggcgttacggatggctttgtcggcaggggttgccttataactttgtttgatttgattcagcatttcacctgaaatgcctccctgttgtgcctgggctgtcaatgcagccgcaaacagaagggcgaatgtgatgtgtttcttcatattattgtaaaaatataaaatgatttattagggtgggtaaatgtacaagttatttttgaaccctgctaatctttcacgtgaaagatatataatcatcagatcctatcattattatgacaggcccggctgttctgcttttttctttatcttatatcccagtatagcaattgtgatactcatcaagggactgataatgttaaagaatgcgtaaggcagatacacaatggtgggaacactaaggatagtagcctgtgtcataccgcatgtattccagggtatcaatggcgaagtgactgtaacagaatcttccgtcgtgcggctcagcagtttgctttcataaccgtttgcactatagatgtctttaaacatattacccgtcaggataatggatatatattgatctgctgtagcaagattcaggaacaagcccgatgcaactgtggatgacaccattcctacccgctttttcgtaaaacgtacaaagacagaagtgatactgccgagcattcctccggctgtcatcgcccctccgaaacacatggcgcagataatcagccagatggtattcatcatacccgccattccgcgagtggatatcagttcgtttatttccgcattaccggtttccaattgggttccaccataaagcattcccattcctcctttgaacaaggcggcaatcccttcgactccttgtccggcgatttcgcataatagtccgggctggaaaatcaaggcaaagacggtagccagagccgtagaaacaaatagagtgatgatggaaggcactttacgtgcaatcagtatcgctgtgacaacggggacaatcatcaaccaccatgaaatatggaacttatcactcaatatacgggtgtattcggcgatatgaccggtatcagtggcttcatgtgacaatccggctatggtaaagattatcaaagtgatgacaagtgatggaacggtggtaatcatcaagtaacggatgtgagtgaacagcggtgtatccgttacggacgatgccagaatggtggtatccgaaagcggagaaactttatcaccgaaataggctccggagataatcgcacctgcaatccaaccttcactgaaaccttgcgccttccctattcccatcagtgcgatgccgatagtggcgatggtagtccatgagctgcctgtcatgacagatactaccgcacaaataatgcaagtggataccaggaaaaaatgaggatgaataacctgtatgccataatatattaatgtagggactacaccgctgaccatccatgctccggacaaagctccgatgatcagcaagataataagtgcggtacttaccccggctatattattggtgacagccagttcgaagtccttccacggacgacggaatcccgccatacctatcagcacacaaacagctgtagccactagcagacagacttggctgccaccggacaaggcatcacttccaaatgtacggatagtgacaaacaataataaaataagtacgaatacgggtaaaagggatactaacggtgaagggattttgttatctttcattctttttttattcaatttttattcaaaatgtaaatagaactatcaatttggttttcagcgtgcaaagttcggaatattttttgagttctaaaagtcaatcggcggtatttaaagactttttttgtatttgcaggtaaacctttttgcaaggggggcgttattagttcaaattataacctaaaacttaacaaatatgaatgaattagttggtggcttaggctacgctgtaaaaaattggtggatgtccctgttgctgggcttgctctacattgcggtagcactatgcttattgttcgctcctgtgagcagttatgtggcactgagtgtcatcttcagtatctcgattctggtcagtggcgttctggaagttttttttgctgccggaaacaaaaaaacaatcagtagttggggatggtatcttgccggaggtattattgatttgctgataggtatttatctggtattctatccgttggtcagcatggaactgattccgtttattgttgctctctggctgatgttcagagggtttacattgtgtggctattccacagatttgaaacgctatggcacaaaggactgggggtggtatctggtgtttggcattctggctattctttgctctatggctatcatctggcaacctggacttggtgctgttaccgtgctctatatgctgtccatcactttccttattatcggatgtttccgtgtcattttctccttcgagttgaaaagattgcataaaaacaagtaaaaaaaatcgtttattttgggctacgtcatacgttattcgtatttttgttagcccaaaataaacaatgatttctagtaagagtcttaaatacactgtgcgtattctgctaggtacactgattggtgtctacctgggaataattgtgctgctgaacataccgtatgttcagggcaaattatctgtttttgtaactaaggaattaaaaaacatactgaatacggaggtttctgtaggacggattgatatgggtttgctgaaccgtatcattgtggaagatgtccttttgcatgaccggaagaaccaggagatgctgaaagtagcccgcttatcggcaaaattcgaccttctgcctttattgaacggtaaagtcaccatcagcagtgtccagctttttggatttacggtcaatttgaaccgggaaactccggaatctgcccctaatttccagtttgtgttagacgctttcgcgtccaaagatacggttaaaacaaaatctaatttggatttacgaattaattccgtgctgataaggcgtggcagagtgacatacgatatattatcggaaccggaaactcccggtaagttcaatgcccatcatctatcggtgaagaatctcgctgcaacgctttcactgaaggcattgcgcagcgactcgttgaatgccgccatccggcgggtcagctttgacgaacaatgtggtttttcattgcagaagttcgccatgaaagttacagccaacaataaacgtttggatattaaggattttggagtggagctttcaaatactgctttaaagatagacagtctgaccttgaagtatgacagcctgcccgaattgccccaaatgacagaaaatataagatatgacggctctttgaaggcttccgttatactgaaagatttggctccttttgtgcctgccttgtcacgctttgaagaaccgttggatctaaatctggttttctccggtcacggcaaacatttggactgccccaccctgcggctgactaaccaccacggattgatgattgcaggggaagctgccttaagtaactgggatgcaggcatggatatgtacatttacggcaaactgggtaacttgaccatgacaaaagagggcataaacgttctgatgacgaacctgacgggaaaggttcctcccattttgcaacgtttggactatattcgttttaacggggaagcggcgggctatctgcatgatctcacactgacaggcttgttccatacaggggcaggcatggtgaaaacggacgtgatgatgagcattgatgaacaaagtatgagcagaacctattcgggtagtgtggcgagtgcagacctggatttgggaaaattacttaatcaggaaaagaaattcggcaaggtggatttcaatgtggaactgaaaggtttcaactataagaaccgatatccggaatcatacatcaaaggaatcatatcttcctttgaatatagtcaatatcaatatgaaaatatcatgttggatggcgtatataaggacggaggctttaacgggcgcttatccatggacgacgcaaacggttctgtccagatagacggtaatttcaatgttgccaaaacaatccctgactttaacctgaaggcatccgtaaagaacctgcgccctcacgacctccatctgtcggacaaatatgagaatgccagtatttcactgggcctcactgctgatttcaccggcaaatccattgacgacatgaacgggcgcatttcattggacagcctgcaattaaacgctcccgatgaaggagggtgtttccttgacaatctgactattacagccggacaggtaagcggtgaaaaagagttgcgcataaattcatccttcatgacagcggtgatacgaggtgactattcctaccacaccattccggccagcgtggtaaagacggtacaacgctatattccgtccttactgactataaaggataatatgcctgagcctcacaataacttccagtttgatatctgcctggaaaatgccgaagtgctatccaaattatttcagattccattggaattatacctgccggcatctttaaaaggatattttaacgacggcgaggaaaagttgcacgtagaaggacattttccggaattcagatacaatggaacacgttatgattcgggcgttttattttgtgagaatccttctgaccggttcaaatgttcactgcgaggcggtatgctgatgaaaagtggtgcaatgcttaacttctcggtggaagccaatgccaaaaacgatcatttggaaacaacaattaactgggggaacaatactgatgtgacttacggtggtaaatttgccgccgatacccgtttcttcaaaacggaaggtccccaccctattcttcaggcagatataaacatacagcccacaaaagtagtgctgaatgatacggtatggaacattcatccctcgcatatcgccatagattcgggacgcgtattcattgacaatttcctgtttgaacatgaggaccaatatttaaggatagatggtaaactgaccaagaaggaaagtgattcctgccgggtggatttgagaaatatcaagctggactatgtactggatattgtgcagtttgacgatgtagagttcggcggacttgtaaccggaaaggttcatctgaaaagtgtcatgaagaacccggtgatgcggacccgtctgaatgtgcacaaattctgtctgaaccgttctttattaggagaagccgacattgcaggtgtatgggataaggaattgggcggagtacgactggatgcccaaatagcggaaaaaggaatttcctccactcatgtgacagggtatgtctctcccaagttaaaaggtcttgatctgtcgattcgggcagatagtaccaatctgggattcttacaaccttttatagaaggaattttcagtgaaataaatggccgtgtcaacggaaatgtccgtttatatggcgatttcaagcatttggatctggaaggtgaagtgagggccaaaatggatgctaaaattgatgtgttgaacacctatttccaaatccgggatgactccatacatatatcttcgggcagtctggatttcaggaatgtaaaagtctatgaccgtgagggacatgacggactggtaaatggttatctgcatcacacaaagctgaaaaatctgatgtaccatttcaatatacgaggcaacaacctgttgatgtacaatacctacgaagccgggaatatgcctttttacggaaaagtatatggtacaggaaatgtggtactggatggtggaaataatgcgatgacagtggacgcttcactgaccacaggcaacaataccagcttcacttatataaccggagtaaccacggaagcagcgagcaatcagtttatcacttttgtagacaaaacccccaagcgcattcacgataatgtggaaaccaatctttaccaccactctaatgtgcgtaagactaaagaggacgacggacctcctatggatctccgcatcaacatgttgatagaagcaactcccagcgctaccatgaaaattatcatggatcctgtagcgggagataatattacagcaaccggaaatggaaacctgcaagtgaattttttcaataaaggtgatttccgtatgttcggtagctatgtcatagatcaaggtatgtataaactaagcatgcaggaagtaatacgcaaggactttaccttgaaatcaggtggcacggtgactttctcaggtgacccttatcaggcgaatcttgatttacaggcggtatacacggttaattctgcttctttaagtgatttggtagtagatccctcgcgcaaccaaggtacggtgaaggtaaactgtctgatgaatctgactggaaatttatccaatccggatattaaattcgatttggaactgcccactgtaagcgaggaagaccgggaattggtacgtagtgctaccagtacggaagaacaaatgaatacacagattatttatttgctgggaattggtaagttctacacctatgattatgccaataatgaccaatcctctaatgcgaccagttctttagccttcagtacactttccggtcagctgaacaatatgttgtcccaatggatgggcaataaaaactggaacataggcgccaacttgagtaccggtgaaaaaggttggacagatgtggaagcagaagctatgttgtccggcaggttattgaataacaggctgatgataaatggaaacttcggctataaggagaatgtgatggcaaatagcaacttcgtaggagactttgaagcgatatggttattgacaaaaaacggagatttccgtttgagagggtataatcagaccaatgaccgctattttactaaatctaccctgaccactcaaggagtaggtctcatgtataaaaaagatttcaatacttgggatgaactgttccgctggttcttatggaaaagacggaaaagctcgttacaaaaacgaagcgatgactaattaacctataaagtttatttcatatctttgcaagacaaatttaaaaatatgaatatgtcctatttacccgccgaatggcataaacaaagtttgattcaactaacgtggccccataaagacacagactgggcatacatgttggacgaagtgaatgactgttttcttaagatagcttatgaggttttgaaacgtcagagtttgttgattgtggctccagaccccgattccataagagatagtatagataattatggagctgatatccaaaaactagtcacatcaaaaatcaacacaaatgatacttgggcacgcgatcatgcttttatcaccctgttgaaagaagacgctactcccctgctgctggatttctgttttaatggctggggaatgaagtttgccgcaaattatgataaccagattaataacgaactgtattttcaccatcctgttctgaaaggtgaatatgttttctgccggaattttattttagaaggaggttccatagaaagtgatgggaaaggaagcctactgactacagagcaatgtttgctggctaaaaacagaaatgaaatgaaccgacaggaagtggaggattttctaaaagaaacatttaacttaaaacaggttctatggttgaaacacggttatctggcaggtgatgatacagacagccatgtggacacattggcacgtttctgtccggatgataccattgtgtatgtaaagtgcaccaatgaaaaagatgaacactataaggaactggcaatgatggaagaagaactaaaagcgttccgtactttggacggcaaaccataccgtctgcttccgctacctatggcaagtgctgtttatgatgaggaacatcatcgcttgccggcaacttatgccaatttcctgataatgaatgaagctgtgctttatcctacttatgctgattctgtgaatgatatgcgcgccaaagaagtattggctgaagcatttcccggaagagagatagtaggtattgactgcactgctttaataaagcaacatggctcgctgcattgcgtcaccatgcaatatcccgaaggtgtatattaataaatatatgtatgaaaagaacgattaaagtaggaattatccaacagacatgcactaatgatatccgtcacaatttgagcaaactgcaccacaatatagaacaggtggcggcagcaggtgcacagctggttgtattgcaggagttgcacaacaccccttacttctgtcagacagaagatacggatatgtttgatttggcagaaccggttcccggtccttctaccggcttctacagtgagttggctgccggatacggtattgtactggttacttcgttattcgagaagcgtgctccggggctatatcacaatacagccgtcgtttttgacaaagatggcagtatagcagggaaataccgcaaaatgcatattcccgatgatcccgcctattatgagaaattttattttactcccggtgacctgggatttgaacctattcagacatcactgggaaaactaggtgtacaagtctgctgggaccaatggtatcccgaaggtgcacggctgatggcactgaaaggtgctgaaattcttatataccctacagctataggttgggaaagcacagacactcaagaagagaaaatccgtcaactaggtgcatgggtaaccgtgcagcgtggacatgccgtggcaaacggcctgccggttatcgccgtgaaccgtgtaggacatgagcccgatccttccggtcagactaatggtatccaattttggggtaatagcttcgtggcaggtcctcaaggagaaatactggcacaagccagcaatatggatgaagaaaatatggtagtggaactggatatgacccgtagtgagaatgttcgtcgctggtggcctttcctccgtgaccggcgtattgatgagtttgaaaatctaacccgacgctttatagattaaatacaaacgttatcgttatataaattcacatattcgttaaacaattcatggttaaggctgttttagttatcagaatattcaaaagatattattgatttactaaacagcttaattatgaaaaaagtattatttttagccgcattgttacttgtttgcttcagcggagtgacaaatgcacaaaccagaaaacaaagagaagacgctaaacgcgaagcatggaagaaagaacgtcaggaaaagaaagccttggaagctcagcaggactctgtatcctacgtccaagcaattaatgctttaaaaaacggttcttttgtattagaagctgataacgttgtattccgtaatggaataatgcgttttgtttcctctaacacgaattatgtggaagtaaacgatgggcaaggtattattcagaccgcctttactaattttgtgtataactggagcccgaacggcttgggaggtgtcacggttcagggaaatgtgaacggaataagtatgcgccaggataaagacggtaatgtgtactataattatggaattaatgggattgccgtttcggccaccgtttccattgtactgactggcggaaccaatcaggccagtgttactataaatccaaatttctcaggcaatacgctgacaatgaacggatatctggttccctataacgaaagtagtgtattccaaggaacaacatggtaattcattaagaagatatgagaaaaaggaatgggcattttcactacccattcctttttatttattattatagcattggaaatgtttcttgtctgctcataacattaaccgaggttgtgattccaattccaataaaaaccttttagcggacagtccgcctccatatcctgtcagcgagtggtcactaccgatcacacgatggcaaggtgcaaagattgatatggaatttgcaccattagcattggctaccgcacgaactgcttggggcatcccgatatgcctggccatttcaccataagatattgtcctgccaaacggtatctttaacagttcattccatactgttttctgaaaatccgtgcccacaaaaagaagcggcacactaaattctttgcgttgtcctgcaaaatactcgttgagttgctctattgattcttcgattatttctgacgtacttatttcaaattcggcacacaatacccgcttcaaccgttgattcacacgatcgcagtgtttttccacctgccagtcacacaggcagagttttccgccaaatgaaccgagcagcaacactccgcagggtgattcataactctttatcttgatcgtatttttctctttcatacactttttatatgcttccttcatatgtttataagctgtttcagcttatcggactactttaaaccaaaaagacaaagcgtagcgaattagctgaaacagcattcactacgctttgttcggatcgtcccgttatcggccttttatacaatatcctatataaaaagcggaaaaaacttacttatcctcttttatatcaacgaccagattcaactcatccaattgtgattgatccaaagcagcgggagcatccaacatcacatcacgtccactattatttttagggaatgctatacagtcacggatactatcaagtcctgcaaacaaagaaacccaacgatcaagaccgtatgccaaaccaccatgaggaggtgctccgtatttgaatgcattcatcaggaagccgaattgttcttgtgctctttccggagtaaagcccaaaatttcaaacatcttggcctgtaattgtgaatcatggatacgaattgaaccacctcctacttctacaccgtttactaccatatcgtaagcatcggcacgaacagcagccggatctgtatccaacaaaggaatatcttcttctttcggatgagtgaacggatggtgcatggccatcagacgaccttcttcttcactccactcaaacatcggaaaatcaacaacccacagacaagcaaatttattcttatcacgcagtcccagctgacgtcccacttccagacgaagttcgcataactgcttgcgggtcttcatagcatcaggaccactcagaatcaggatcaagtcacccggcttggcactgaaagcttccttcatctgctgaagtacttcctgtgaatagaatttgtctacactggattttacattgccatcagcttccacacgggcgtaaaccatacctttcgcaccgatctgaggtttcttgacaaattctgttaattggtctaactgtttacgggtataacttgcagcgccttccgcacagataccaccaatatatgccgcatcatcaaaaacagagaagccatgacctttcatgatatccatcaattccacaaacttcatgccgaaacgcaaatccggtttgtcactaccgtaatatttcatggcatcggcccatgtcatacgcagaaacggttcgctcaactcgactccacgtaactccttgaacaaatgttttgccattccttcgaaagtggaaatgatatcttcttgttcaacaaaactcatctcacagtctatctgagtaaactcaggctgacggtctgcacgaagatcttcatcacggaaacactttacaatctggaagtaacgatcaaagccggaaaccatcagcaattgcttcagtgtttgcggagactgtggcagtgcataaaactgtcccgggttcatacgtgaaggaacaacaaaatcacgggctccttcaggagtagaacctaccaacataggagtttccacttccagaaaccctttactgtccaaatatcggcgcacttccattgtcattttatgacgaagttccaaatttttacgcacacaattacggcgtaaatccagatagcggaatttcatacggatatcatcacctccgtcactattatcttctatcgtaaaaggaggagttaccgctgaattaagtacattcaataccgatacgataatttcaatttcaccggtgggaatattcatattcttatttgaacgttcgttcacttcaccggttatttgaataacaaattcacgccccaagtgattggcacgttcacaaagttcggcattcaccgcttcgttgaataccaattgggtaataccgtaacggtcacgaagatcgacaaacgtcatccctcccattttacgtgcacgctgtacccaacctgccaacgttacacttttgcctgcatcggaaagtctgagctctccgcaagtatgacttctgaacatatattcttaaatttaatcaattgtttggcaaaggtacgatatgttttccattgtacaaaaccgcctacaagaaaaaaagtcccgtagctgtataccaacggaacttttttaatctggatgtacagatctcaattcttgaacatttcaatgacatcccttaattctcctggaaatacttcaccagttttctcccacaacatcttgcctttacgttggaggacaaagctgggagctatttctatttcataggcatcggctactttccgattactttctatattgactcttacaatattgaccggtttttcaaattcatgtaacagcggttcaatccattcacaatggggagaccaatccgcataaaacacaaccagcaataatgagtccgactggtttacctcttctatttttccagttatatccattactgttttcaattttaaattatcctctacttcctaaactgttcacgtcaggattcaactcttttaccgctgctttcacctgcttcttggtaggcttaccagtattggacacttgttcaacaggaaaccgctgaccactattcgtcagctcatccttttgttccatctttttcttttcttctttacccatatcttctcatttttaaggtttatgctaataatgcaacaaaatagataaaaagatggttcacataaaaagtgaaaaaggatgcctgaaaattattcagacacccctttactactacatttaaaactacgtgaaattgagattattatactttacggtcgcaataacgtttgcattgtacacaaatatcataccccagcatagctccaagaataaaatcctgctcgggtgacaatttgttcagtggctgattcactaggaaacgaatggcattaatgcattcttttctaccgaaaaacaggtttattttatcatttcccacgggctggattatgtaattaatcttttgattgatcagccgttttacagcaaaatcttcatacttcctcttggtagtatagagtaccatctgacgtactcctttttttaattcataaatatgattcagaaatactttcaattctaccgggtttatgtctgaagctatcataaggcaattgtcaaaattacaggttcttctttatttcttcaacccaactgttaatacgttcttcagtcttgccactttcgttcacgtcatcaagagccaaacctacaaatttcccatcgattatcgctatagaagatgaatacgaatacccatcggcagaaactgcccccacaaaagtgcaacctgaattctttaactggtcatatataactcccataccgtcacaaaatgtatcacaataggattctgaatctccacagccaaagagagcaactattttaccattcaaatctgcagtctttatcattttaatggcgtcataccaatcatcttgcaattcaccgtctccccaagtagaagtccctaacaataaaatatcataactttccactttttctgtggtaattttacttgcatcaattacatcaactgatgccacacctaatttttcagctattgtctgtgcgatgctctcacaagttccagtagaggaaccataaattatacccatttttttcatacagcaaatcatttaatttgtttgctgcaaagtaaaaggtttgaaagagattctgaaatacctagaaatagtgattttaataaagttcaagaaacaaaactcagtttttgaaaacataaacttataatctgaaatttaagcatcctaaaagactaaagaaagggtcgtatcattactcaagacagagtttgatacgacccttttaagtgttataattactatctgtaacttttaggagcagtcattttcgttttgacacattaatatgtttttagaaccgataagcagctccgaaattaataaccccttggtcaaaatcatcaaccaattggtatctgaattcaacattcatagcccagttacgtcccaaagcgaattccgccccagctccgagattaaccccgatacggaattcattatggttacccccatcatcaacatggacgtggtctccatcccagtcaacatccaaatcatgcatgtcaaacatccagttggacatggtcagaccaaacagcggataaagtttgacactttgagctaccggacaaagatagtggaagttcacatttaaatccaacatacttacattgtcattctcaaaaaaataattgaatgaaggttcaatacggagaggattagtgatattgtactggtatttaattcccaatccagcactttcaatttctgttccgtaacttaatccaaatccaattgcctgtctgcctttttgagcgtaggtactgctcaacatgacaaacatcagtcctaaaaaaataaagatctttttcatttttaaaaatatataagtgtgttaatcgtcttcatcgtcatcatcccaatcatcatcatcatcgtgccatttatgatgtttatgacgcttgtgttttttataatgcttgcgatgatgcttatcatgatggtcacaataagagcaataatgttcacgccagcattcgctatgataacgaatcctgtcataaaatggatcatagtacatcgaccctggttttatgcctatctctaccaatatacgattccagccattccggtggtaacgcttgtaatagtcacacacctcccgcatatgcctgccggaagtctttgctatttcaagagccaaaccgacattcccccaattactaccacatcttctgtaataatcatccaataattgattagatatattatattctacgcataaacgtttccgatagtcggataactccacagctgcatacttgttcgccctgcctatgaacagagaaagcctgtcttgtgcaaacatggaacaagaaatgactataaataataacagtacttgaattcgtttcatattaaaaccatttggcaataaaactattgaaattgcaaatatagatataaaaaagcaatacacaattttttatggagaatttagatactgtctaattttacattttgataaaaaaactacttcttttttccttcccaatgattgttttaaatggtttcttgctggcaataatgataaaataacctgcatacatgatggtaaagcggcctttatactattttctgaatgtctctaactttttcaactaccttactgctattttcttactttcgccaagaactgacatcggttgtgaaaattataataaaacccctctcaaaaccgtgcaaaccagcacagactggagagggggtatgaaagagtttgcttagaatttatatcctaaagtaatgcctatatttgcattatggggggcatcgccatccattaccttgcaaaaaccaagttgggtatcaagacctacgagaatctttccgaactccacacccagaccaatgttccatcctgcatcaaatctgttgtaatccagtccgtcatcaccgaatgtgtctattttgtcatcaccattaatatggatgcctccaacggatgcgtcaccatcgaatttagccttaccacctactccgcaagccaaataagggcctgtcgcgatgacaaggttggtgttatctgcaatattaaaacgaaactgtacgttaacaggcaattcaagatagagctggttaattttcacatcagcatcagcatctattatatttccgtcaaatccacttgaatattttgcccccttttgcgaaaagaacaatgaaggctgtaaagatatcatatcattaaactgatactccatccccactccgatacgtgctccgggtttaaattcggagtgatctgaattctcaccaatataactactaaggttaagaccagcctttacattaaaagacacctgcgaaaatcccatagtacagattaacgcaaacaatacggttaaaatactttttttcataatcataagttttgattaaagattatttattttatcattgcttcaacaatgacaatgcaaagatataacaattataagttcgttgtcacctcaagcagacttttgttatgcacattctaaagattatatggtttatttttaagaatccaaagtttttcatataactatagaaattatctataagaaaagaatatactccccaacagttgtttttggggaactttattatcgtctattctcctcttccttattgaatttctctctttgttccttcttttgtacgatattgataaaagaagaactaatgataccggtcggaatggctaccattgccacacctaccagacaaataatacaacccaataatttccccaaaaaggtaatgggataaatgtcaccatatccgactgtagcaaatgtaataatggcccaccagattccgtcaccgatatttttaaagacttcaggttgtgcattcctttcaatataatacatcaaaatggcggaaaagcaaattgtaatgaaactagctgtgtaggctgtttcaagttcttctctgacagaagcaagagccataccgataattcggaaagatcgcgagtgccgtattaacttaaaaataatgaagatatagggtaaaataatgacatgaacgacttccgtatcccagtatgcataggtaagaacacaaggcagtactgccacgaagtcaacaaaaccataaaaagagaatgtatatttcagacgtgcctttgctgttttcataccgggatagagtgccggtgcagatacgatacgggctgtgtattcaataagaaaaataaaagaagatacataagtaatgccgaataacagtactttgtatgtggccatttcttcaaatgaacttgcaatgacggctataattgaaatcagaatgaagaaaagaacaaaatattgaacaaattttcttctcaataactgttgaatcaaaatatataatttcattttgcaaaaaaaattatttattcatgctatccgtgtgttttccacacacggatgcaatcactttgttattcagactcttttattggatgttttactacaaaccttctcaataataaaagtcgctttttagttttgtattgctaaaaacgatccgcaattatctgactaaaacacataagcaagtgataactgccaatatctatttttgctttcgaatacatcaccatcaaaaatttgatctatggcatcatgcttattgcctcctatattatgcttggcagactgggttaatcctatattataatagcaacttaccattaaatgatttacaattttcactccacctcccaagttcaatccgacttcagtcgaacgccatcccatagatggaagatccttatctataacatccacagctatatgagcaagtttgcgtccccagttgtccttgtctaccaaaaaagaaaaggaaggaccgactcccaaaaacaaatcaaaattatttgatattcccatttcccatttcagttctataggaatatcaatactttgtgttttaatgtcagcgctgcgtctgttagaggtatttgtcagtttgattccacgctctacatacagcagagaaaagtccaaagcgataccatgaaatcctgtttgatattgcaacataggccctacttgaaatcctgtcaaactctcttccttaaactggtcacgcatgccactaatatttgctttgttgccaagcacaccggcttttaccccaaaatgtaatccctgagccatactatcagtgattccccaaaatacgaaaatcgtaaaaaaacaaattaattttttcatgatcatttatttaagaagttgaatatgtttctattattttgaagattgatgcacagtaagttgtgggaaagggaatccgattccttctttattaaatgtcgtataaacaatctcattaatatcatataaaacattccagtaatcagctgttttaacccaaacacggacagtaatgtcaacgctactcgcacttaatgagcctaaaacaatgataggagcaggagtatccaaaatacgtttgtccgcataaataatacgttgcaatacggttctgaccctttgtacatcctctccatattctactccgaatacccattcaacacggcgcatttcctgtttgctgtaattaatcacagcatttccactgagcatcccgttgggaacgtatatcatccgattatcaagagtggaaagtatggtatggaaaatctgtatctcttttattgtaccacttactccaggtccatctatataatcgcctactttaaacggtttaaaaacaagtataatcaaaccacctgcgaaattggaaagattgccggaaagtgccatacctacagccacaccggctgacgccaaaagtgcagcaaaactggtcgtttccactcccaacttgctgattatggcaaaagcaagtaccatgttcaataaaatttttactaaacttttcaagaaagtctgtacactggtttctatcttccgtttttcaagaactttggctattaatacactaatctgcttaatgataaaacgaccgactgaatatatcagaatggcgacaaatatatccttaccagcgtccattccaaaatctaccagtttctccagtgcttgctcaagtttactgcctgaggctgcattcaataataataaattcatttttttcgtttaacaaataaaaattaatcagcttgtcacgatcatattgcaaatatgccagcacatcctgacagtatagtttcgcaatgttccaataaatcatccaatatatttttacattcctaaatagtcggatatttaaagccgcaaagatatcatatataattgataaaaaccaaacttatcacttaaaagagagaacctaagcaccgtattctgtatcaagcatacaactctaagataatatatttaatttttttcggtaatatttgccgaaacatcggtgaagcactattatactaggtgaaaaatgcacggcacaagaacaatctagcactccatgctgcataactaatcaaaaagatccagtaaaaaaacataaaaccaactagttaattcatacttaaagagtatcaaaccaatcattttctgtatttttaggtacttctctgtaaataatactcaataatgaaaacaagaaaaacattctaacaaaacataactaaaatacaaaatatttcagagattcactctaccttaaactttacagcattcgacatttagaaaaaatatcgtaagagttttaatgagagtaaactcggaaattcattccgttgacaaagcaacccacttccatcaaaagaaccattacttacatgctgtaccacagaaaggcaaccaatatatcatactatcttctgatctttcttctaaactttaccctgtactctttcatacggttagttgctatatcataacaagataataagctgctattagagaaaacaatatttttttaagatgtttgtagactctgataaaattaatacctttgcgaagtcaatttatatataaacaatgtcgaaatgtaaattgaaatattgcagataacaaaaaaaggacaaagaaatatgagacttataaaagtaacaggtggtttgggaaatcaaatgtttatttacgctttttatttgcgaatgaaaaagtactatcccaaagtgcgtatagacctttcggacatgatgcattataaagtgcactacggatatgaaatgcatcgtgtgtttaatctgccccatacagaattttgtataaaccaacctctgaaaaaagttatcgaattccttttcttcaaaaaaatatatgaacggaaacaagctcccaatagtttacgagcttttgaaaagaaatacttttggcctttactttattttaaaggattttatcagtcggaacgtttctttgcagatattaaggatgaagttagggagtctttcacttttgacaagaataaagccaacagtagaagtcttaatatgcttgaaattttggacaaggatgaaaacgcagtatctctacatattcgtcgtggagattatttgcaacccaagcattgggctactaccggaagtgtatgccagttaccttactatcaaaacgcaatagcggaaatgagcagaagagttgcctctccatcttactatattttttcagatgacattgcttgggtaaaggaaaatcttccattgcagaatgcagtatatattgattggaatacggatgaagacagttggcaagatatgatgcttatgagtcattgcaaacatcacatcatctgcaacagtacattcagctggtggggagcatggttaaatcccaatatggacaaaacggtaattgtgcctagtcgttggttccagcattccgaagctccggatatctatcctacggggtggataaaagtaccagtgagttaatccacaatacacatgaatacgcacgtctggaaagctaaaaaataattggcatttcggaaaccgctgagccgaaatttcggctcagcggaaattgtagcatccatgttcatttttggtttagggatattcagtaaatgtctctaaaaaataagatggcatatgaagatgatagggcatgaccatttcatatgccattcttattgtcatttttccgtgctttctcacatacttctatccgacaggacatgacgttccggaagaagtctgatgacctcttctgattctgtgagtaaaatcatatcatgctgctttagctgttttgtttctgattttttctatcatcagtatggcatttgccgtatgtattccaaagaaaatccacagtatttccgtcttcctgtttctggcctttatccttgagagcgagtaatgttgcttttgagtgccgaagcttccttcaagccgtgttgccctttcttttgagagttcgcttctaagcaccttcctcaaaggctcatctttggccgcccttcccttgcgcacaaaggatgtggatatcccatattttgtacagaactttctgttggcattattggcatatatggaatcggcagccacacatcttacccttacattcataagcttctgctgcatacggatacagtccttcaagcgtataccctcattgaatgccttgaacgagaggtgttcgatgaacgatatgccgtctatctgtatattattgacctttgcaccgaactcgacggacttggtttccttgcctctgacgatgggacgtacataatgacggtcaatgctgacgatgcggtcactgactttccgcccttcaaacatttccttttcttgtacaagcacctttctgatgatggaaagacgcttgtgataatcctgggtatatcggagtaaaggaccgtactcgctatggatcccatccctttgactgaggagcttttcaagaagcttgatcatacggcgcttaagcattcttgtccttgaagctctcctctttcttttcttgcagtaggacagataggattccgccacattcctgtatttgttgcgcggacgccttatgcccagctccctgcaatgccggcatatatgcctgtagagccattcgaggctttcccaaaggagtttcatgtccgtaggaaaacgcatgtggctttcatagcatgtggcatcggtcatgcagacgtgaaggttatcaagataaggtttccagtgtgaagccaggagctcctggaaagaatcaatgtcaaggcgggatgctatctcattacggatggcactgactatcttgaagttggttatgggaagggacgggggaatcataattccacagaaaatctggtagtgtatgttcccgttcagatgttccaccagttgcctgtcggagaatccggtgtatgccttcaggaccataagggcgatctttgcggaaggactgaatctgttcctgcgtcccaggcgccggtccgacaggccggcggcttttgccatacattcaaacggaaagaccgaatgaagcttgccaagctcactctcattaaaactcttgcggtatttttccagaatatcaaattctgtaaaacccaaagtagggtgaatttctgaaatattcactatctttgccatatcttattagtttggatatttcccccgttttggccgtcaaatcttattttcgggggaatacctaaagatacaaaaaagccaactaattcgcaatactttgtgtatgaattagttggctgattttgtaatatttaatgaatgtcccggtttaacacaccttttcaaaccatagtacgaccatcataaattattttgaagaacgattgacaaatgcttcagcagagtcgttcaatgctaaaatcaaagcttttcgaagccagttaagaggggtggctgatggaaattcttcatgttcagactggctaggctatacgcttaaaagaaagcttgccaaccgggaaaatccgctgaccctaactcacttggttaaaccaaaggtaaaccgccccattcggagaataaaaaaaaggagctacattttaccgtaactccttgactctcatccgtcggggtagcgggattcgaacccacgaccccctgctcccaaagcaggtgcgctaaccggactgcgctacaccccgaatctttttttattttttcaatcgctttatctctcaaaagcgatgcaaaggtacggcttttttttatatatgcaaatatttaaagcgatttttttctactttttttcgcattattacttatcaaattataaatcaaaacattaatcttaaaacttttttttatccgcagcaaagaaatttcagtgtaaaacaactcccctttccgatttcactactcgccgagatacttccaccatgtaaattcataatttgtttgcataaactgagtcctataccactacctgttggcttcgttgtaaaaaaaggaacaaagattttatccaatacttctggaagaatgccactaccattatcacagacagaaaggaaaaatagatgtttttctaaatcacaatgtgtgctaatgataacttcgggatagatttgctctacacaagcctcacctgcattctttagtaaattgattaatacttgttctatctgtgaacgatccagcatcagtgtcgtttctgggttttctactttatatatatattgtatgtttttattaggaaacagttttttcatatcactcagtaaatcacctatatttactggagccagtatcggaacagacagacgagaaagtttacgatagttttccacaaaattcagcaaccctttacttcttctatgaatagtctgcatcccttgcaacatgatattgtaatctctctcattcataccattttgtacagcacgctcacttaatgtttcacttaatgaaataatgggcgcaatggagttcattatttcatgagtgagtacacgaatcagcttctgccatgcttccatctcattttcctccaatacagcatggatattctttaaattaaccaaccggagttccgtaccatgttgagcggaatattcggataccgtaacagccaattcttgtataatatctcctttatgtattcgtactgttttaatttctccaggctgtaatgacaggataatagtaggaaaatcagaatttaacagagccaattccctgacagaatgaatacgataaccgcacaaatcctgcatggctgcccggttcatccaatgtatattgcactgactatctactaccagcaaactgctgtcaacagtattcaataatgtttcataatattgatatcgctcttcattctcggacaaccgagtacggaattcagcaacaacattatttatttcttgtgccaatcgttgttctgtacgagttttgtgctgggtagaaaaactcaaagagaaatctgcataacgaataccttctatcattcgcgatatcatacgggtcgttttatactgccactgacagatataaatgataatacctgccataatcatcagcgaaaaaaacaagcaaaaatagagcgaatgttgataaaagagatatgcagctatagctactacccccattaataacatacaagctatcatccgtaaagtttgtaaacgactcataaccctaatttttcaagtttccgataaagagcgtaacgggtaatccccaaatattccgctgcacgactcaagttcccttcgctgcgtttcatagcacgttctatggcattgcgttctaattgttccaagttcagtatctcatccgtattcaccctcttctcgggttgtggctgcaacatgaaatttgcaggctttaacaatggcgagtccgaaagaataattgcccgttctatggcatgctgcaattcgcggacattacccggccaatggtaacgcatgagtttctgcttggcttcgcggctcagtccgtttatctctttcttatatttatgagtatacctttgtaagaaataatcagccagtaagagaacatcctctcccctttcccgcaatggaggaatagtaatctcaatcgtattgatacgatacaacaggtcttgacggaaattaccctcctccaccaattctcggatatttacatttgttgcgcttatcaaccgaacatcaataggaattatatccgttgctcccaaacgtgaaatctgccgtttttctatggctgttagtaatttggcctgcataggtaatgacaaattccctatttcatccaaaaaaagcgttcctcctgatgccacctccatacgtcccgcctttgctttgcgggcatctgtaaaagcccctttttcatagccgaacaattcactttcgaataatgattcaggtatgctccccaagtcaatcgttataaaaggacattcacgacgaggagaaaaataacgtagagaacgggccaccaaatctttaccggttccattttcacccaatatcaaaatattagcatcagtatccgataatttccgaatagtatcaaaaacctctcgcataggcgctgagtgacctatcatttgaggcatctcttcatcctgcgcgctcaatgctacaacttgttctttcagttgcctgacctctttacgagaatcacgaagtttgatagccgatgaaagcgtagcaagtagtttttctttttcccaaggtttgggaataaagtcaatagctccagccttaatggcccgtactgctttatctgtatccgcataagcagtcataaacaagacaatagcctgcggatctaactttaatatctgctctagacaatcgaatccttcctgcccgctgatagcatcccgacgaaaattcatatcaagcaaaataacatcaggttgaaaagtagtcatgaaatgctcaatacgagtcggttgagtagtaacttttattttttccacgtagggatccaataaaaggtttagtgcaaaaagcacgtcctcattatcatctataatcaatatttttccttttgcattcattattttatcctcaatatatcttgttatacgaataaaagattttctatccgcttttttgcaaagatattgttttttttaatgtgttgtctgtgcggatacgcacaaaaatagtgcgtatccgcacagagacatcattatcttttatcccacaaaaatctggtaaacaaagagataagataatggcacgctatttgattagtctacaatactaatatattaagttatgaaaaaaaaatcagtaatagctatcaatttatgccttatagcaagcatagtaactctattcggcaataagatctatatgctttatataggtgactgccatcaattgtgggaagaagcacaaactcactatgttaatcgacaatatgaaaaagcacgcgagttattagaaaagatagctcacattgatacggcccatcatgcccaatatctgacaggcgatatgtatttaaaaggcttaggaggtgaaattgattatgataaggctttgaaactttttcatcaatcggcagcgggcggaaacacgtatgctgaaaacaatataggttttatgtacacatatggtttgggagtcactaaggattacagccaagctttcaaatggttgaacagagctgccactcaaggaaatccagaagctcaaattggcatgggaagcctttataaaaacggttggggagtacgtaaggattgttacattgctatgacttggtacctacgttctgtagctcatggtaatacggacgccatgaacaatatcggttatttatataaaaacggacttggggttcccaaagactttgaagaagcttatttttggtttaaaaaagcagcagataagaataatccgatagctcaatataatataggaaatatgtattgttatggcgaaggaatggaaaaagactttgctaaaggagctgagtggctgaccaaagctgctttacaggggaatgctcctgcacaatacaacctgggccgcatgtatcagtggggtaaaggtgtaaaaaaagacttacaacaagcccggttctggttccaaaaagctatagacaacggtcatgaaaaagcaaaggaagcattaaccaaaataaaaagcgacttatccaaagaagacaccgaagacccactcctgttcacctaactataagccaaaagtactaataggtataaagacataaaaaaaaacgaacatgaaactatattgtattatagcactttctcttctgcttcgcccggaaacagccacagcacaacaagaagaatcaataacattgagtttgcaacaagctattgaaatagcacaagaaaactcaccggaagcacaagctgcccgtcatacctatcgggcagcttattggaactaccgttttttccgggcgaattatcttccctccgtcacattaacttcatctcctaccctaaatcgggagataaacaagattacccaaccggatggaacaaatcaatttatccagcaagaccagttaagcacagatctcagccttaaaataaatcaaaatatatggtttaccggtggcagcttgtttgtaaaaagtaccacccaacgcattgatgaatttgaagataatcatacagcgtataacacccaacccatagtaataggttacgagcagcaactttttggatataattctttaaaatgggatcaccgtatcgaaccccttcgctaccgggaagcccgtaaagcatatgcagaagcattggaacttgtagcctcagaaaccagcactcttttcttcaacctggcaactgcacaaactaatcttgacatagccgcctacaactatgcttctgccgatactttatacaggtatgccgagggaagatataatataggaaccataactgaaaacgaaatgctacagctggaaataaacaaactgacagaagaaaccaatatgatgaatgcccgcatcgaagtagaggaccaaatgcaaacactccgttccttccttggcattaatcgggaaataaatttacgagtcattccggaagacagcattcctcaactcgaaatccctttacaaaaagcattacaactggcattcaaaaacagtcccgatcctgacacttataaacgcaaacaattagaaagccgcagcgcattagcttctgcaaaagccaatgcaggtttgaaagccgacctgtatgtacaattcgggctttctcaaaccggaaataaatttgcagattcttaccgaaaccccatgaaccaacaatatgccagtattggtatttctttacctatcctggattggggtcgtggaaaaggacgcgttcgtgtagctcgttccaatgtagacttagtagatacacaggctgaacagggaatgaaagattttgaattgaatgtatgtaaaatggtccgtcaattcaatcttcaagcataccgtgtagcagtagccgccaagacggacaagacagccgaccggcgccacgatgtagcacgccggctttatatcttaggaaaatcgacaattctagacctcaatgccgccattacagaaaaagataccgcacggagaaattatataacagctttgaaaacttattggagtctgtattatggtattagaagtatgacgggatatgatttcctcagaaaagcagagatttcatgtactatacctaaaccttaactacacggcagatataaatgatctttgtattatcgccatacttaaaaaagaaataaaaaaattatatcaaaaaacataaactaatggatataaaaattgaaaagaaaccgtggtacatccgctatcgctactatatgatagctgcactggccttcattatcttccttatctatgtgataagcctttcattaggtcctcgcaagctgcgtatcgaaacagacaacattcagatagccgaagtaaaaaacgacaaatttatggagtatgtagatgtggaaggactggtgcaacccattcttaccatcaaagtaaatactcgtgaagccggcagtgtagaccgcattgttggagaagaagggaatatgatgaaacaaggtgacaccttattgatattgactaatccggatctgattcgttccattgaagaccaacgtgacgaatgggaaaaacaacgaatcacttataaagaaaaagagatagaaatggaacaaaagagtctgacactgaagcaacagacattacaggcacaatatgagatggaacgactgcgcaagagcttcggactggacaaagaggaattcaaaatgggaattaagagcaaggctgagcttcaagtatctgaagatgaatataagtataaactgaaaaatacggcattacaaatggaaagcctgaaacatgattcatccgtaacccttatccgcaaagaattattgaaaaatgatctggaacgtgaaagcaaaaaactgaaacgtgcggaagaacggttggaggatttgataataaaagctccgattggcggccaactaagttttgtgaaagtaactcccggccaacaggttgcttcgggagaaagtatagctgaaataaaagtgctggatcaatataaaattcatacttctttaagtgaatattacattgaccgcatcacaacaggtcttccggctaccgtaaactatcaagggaaacgctaccccctgagaattactaaagtagttcctgaagtaaaagaccgtatgtttgatgtagatttggtatttaccggagaaatgcccgagaatgtccgtgtaggaaagagcttccgggtacaaatagaattgggtcaacccgaacaagctatagttatcccacgtggaaatttctaccagtctactggaggacaatggatttacaaaataaacccatcaaaaacaaaagctgtaaaagttccattgaatataggacgccaaaacccgcttcaatatgaaatcactgaaggtttacagcctggagaatttgtaattatcacaggatatgatacctttggtgacgcagaagaattgatattaaaataaaacatgcaacatgaaaactttgaaatatgcctggcgcttcttaatgcgttctaaatcgtatactatcattaatttgctaggactggctttcagtctggcatgcagcatcatcttgatgcgatatatccatagggaactgacggtggatgcacatagcgtaaatccggaacatatcatcattcctatacgggatatagaaggaaatcttcatccgggaagtttgcaacaaggctggtctgaaactgattctgtttatattcctgaccatcaaatagtggaacaatgccgcctgatgttacagcagcgagacaatgtggtatatgaaaacagtaactatgcaatgaatatagcagcagttgattccactttttttcatttcttccactacccggttgcagccggtgaggcccatttagatgcccctggtgacgccatcatcacccagcgctatgcccgtaatatatttggtaaagaaaatccgataggaaaagtattggaatattatggtaaaaacatcaccatcaagggagtgattggagaattgggatgcaaatcattacttcggttcgatctactggtatcatacagattggtggaacactggcaacgtatggatatatcactgatgcgcatactccccggtgtagatctggataagataaacaaagcaagcaatgtgtacagaaaggacaaaaggggaaacagaatacgctgggaatttattacttggaaaaatttatactggagaaattccattggtcacgatgacgattacgattccatcatgcaattcggtaaccgtacacacctgtatattctttcaggagtaaccatattgctattattggtaggtatattgaatttcatcaatatttatatggtatttatgatgaaacgttctaaagaatatggagtaaagaaagtattcggcttgcagcgtctgcctttgtttttacaaatatggatagaaaatctgttattagcctttgccgcattgctaaccgcctggctgttgatagaagcaacccaagtaccagtcagccggttgatgaatgaacaaattagctattcggcattcgactggcaattgtctttgggattcatcatattattacctttggtcacttctatttatccatacatcagatataattatctccctcctattgtgtctatccgttcaataacatcaaaccgtcatgctatcactgtacgtatgacattccttttttttcaatacattataaccatattactccttatcctgtccttttactttggcaagcaactgcatttcctgctgaatacctctcccggatatcggacagaaagaattctcagagctgagttgttacacgaaaacaaaaattatctgcgctctgatacagaagaaaagcgcaatgagcgctttgcccgccaagaccgtatcaagcaactattaaacgagtgtcctcacattgaaatgtggatgaattcccattattctatattaaggggaggctctatctgcatgttgttaaatgaccaggatacccgtcaacccatgctcaccctatttccttctccacaattcttccaactatatgatttaaaagtactggaaggagaaatcccccaaaaatttgaaggttggagtgactataaaatggtactgaacaaagcagcaatgaaagctatgggctatactcggctagaagatgcttttgtacgcagcgaatccccgctttggattagtgtcagcgaaaaaggagaaatggaagaaggtggaaccaaacttatgcctgtagtggctataatagacgattattacccaagccatctcactgaaggaataaaaccgatggcatttgtcgtagggcccagcagcggcaacagcgattttttgattgccgtcagccccgataaagaaaaagaagtcatagaatatctgaagaaaacagagaaagaaatatataataccgaagacttcacctatacttggttgacagatgaagtccacaaactttatgctcaggaccgtcaaacagcaaacatttactttgtctttgccttgatagcaatcatcatctcctgtttgggattatttggattatccttatttgatatccgacaacgttatcgtgaaattgccatccgcaaagtaaatggcgcagggatgaaagacctttacctgctattgttccgcaaatatatcaaagtaataggttgtgcatttgtattggctattccacttgcctattacctcatatatatgtatacacgggattttgtactaaaaatacctgtagatataggaatttatttagcagttctagctatcatttcctttatttcatcaagcacattaatttggcaaatacacaaagctgctcaaattgatcccgcaaaaattataagatcagaataaacacacattaaatatgaaaacactgaaatatgcttggcgctttttaatgcgttctaaatcgtatactatcattaatttgctgggactggcattcagtctggcatgcagtatcatcttgatgcgatatatccatagggaactgacagtggacacacattgcatcgacagggagcatgtgtatgctatctgtaccaatacagaaggtaaccggggactgagtggactgaaacaatataactatgataccatttctatcgacaatcgtttcgtagaagctatgaccacctatattccattggaaaaggactatgtcatttccggtaccaaccgtattccggcacgttgcctcgttaccgacagtgtatttttccagttatttcattatcctatagtgcaaggaaagctatctctcacaacacctcagtcggcattattaacagaaaaatacgcccgtaagattttcggtaatgaaaatccgataggtaaagtactacgttatagcaatggcaaagatattaccgtagaaggcattgtaggagaacctgagtgtaaaactacaattaactttgatatcatcctctcttctaaattatcccaacattgggaaaggatgaatacagagctctatcgtttcctacccggtacagatataaatgccataaataagacaggtagtgtcccacgatatataaatgaccctaaatatgacactcgcacacatacattttctttaatttctgtgaaggatatttactgggacggttctttaacagaccgtgaacctgctatgtttctttcgggaaaccattcccacttaattattttgtcgggcgtatgcctgttattgctcctcaccggcatcttgaattttattaatctttacctggtagcattattacgccgcggaaaagaatatggattgaagaaagtatttggtgtatgcggcaaaacattgtttgccaatatatggattgaaaatacattactagttctgagcgccttattagtatcctggcttattattgaaataatgtctgcccctactgaatatttgttcgacattcacttttcttatacggctttcgacggatggctttcggcaagtattttattattgttaccagtaataacttctatttatccatacattaaatacaattacacctcccccattctttccattcgctctatcggtgtccaaagtcattccaaacattttcgtatgttctttctaggggcacagtatattataacttttttgttagtggtattatcactttattttaatcgacaacttggaatgttgttaaataccgaacccggctttcgtactaaaaacataatgaatgtaaatttagtatatgaatcgaaagattttagcagttatacttatgaaagtatgcaacaacgccgccaacgtgtcatgcaattggataatgaacttaatgcatgcccttttattgaattgtacgaacctagctatgagaatatccttactcctacctttggtacaaattatctgaacaataaaggagaaaaggtgtttctgaatattcattacgccactcctgcatttttcaaattatatgatataaaagtaattgaaggtgagatacccgatataaataaagaagaccggcgcactgtttttgttgtaaacaaagccgcactgaaagcattaggctatacttcaatcaatggcgctggagtgattgaagaaaatcaaaaaagggctaatgctaacgcttctcttcaacctatcgttgcagtagtagaggattattttgaaggacatttgacatcaggaatcaagcctactatctatcctgtcggagcacggttcagtggtgatctttatcagatagcttatacacccggtaaaaagaaagaagtgattgatttcttacgtaatttggaatataaagtctatggaagtgaagactttgaatatactttcctggaagatgatatcaaagcgatgtatacacaagaccgccaaacagccactatttattctatttttgcaggtatggctattattatttccagtcttggtctgttagggatttctctttttgacattcgccaacgatatcgggaaatagcgattcgtaaagtgaacggtgcaagtgccaaagacctttaccgactgttattccgcaaatatataaccgttttaattatagcatttatcatagctattcctttggcttattatctgataaatacctatactcaagattttgcagtaagggcacctgtcagtatagacatttttatcatatcattgctgttggtaataatcatatcactgggcaccttagcataccaaatacaaaaggcggcatatattaatccgacacaaatcatgaaaacagaataattttataaaacaacggaaatatgttaaggcattatataaaaatggcaatgcgccacttattaaaaaataagatacaaaatctgatatctatcgtagggctatccgtcgggatattatgttttagtatctgtctttattgtagccggttcatcagcgaagtagattcttgcttttccaataaagaactcatagcagacataaatttatgtacaacacggggagatttgtattctggtattccggcaacaacgattgaagaattgcgcaaacttagattcgatgaggttcaagattttacctttaccgtttatccccgagagcggagttacaacgtagagataaaagaagggaaagaattgccatacgatcatttgatgacaatggaagtagactctctttttaggaaagtattcactccccgaatactacagggatcatgggaagtagcctccaacacccccaatgccatcatactgacccgctctttagcaaaaaggattttcggtgaatcagaaaatcccataggcaaacgtatgatattgacacaacgtctttttacagcaccggataccactcctcgtactggaggcatagcctataccattcaagccgtgatagaagatattcccctgaataccagcctgagttttcttgagaaactggacatgctgactttgaatgacagtgaaggaacattgcaattcaacggtcgtaataatatgactggaggttttggttttgccctgctacatccgggtaaaacagctcgaaaattagaagcccgttttcgctccataaatatgaagcaccacatatatgacgaagaaacagctataaccgcctcgccctttggaaagaaattttgggataagtccattgctccttattttgcaggaataaccatgatagtaggcctgttgattttactgaccggacttcttaatttcttccattttcttatgggaacttttttgaatcgtaaccgtgaatacgggatacgcaaagttatgggcagtggaaaccagcaacttttttaccaactctttgtccagtctgtcatcattgcattcatcgctttcttgtttacgttctgcttgattgaaataatcagtccctatttgaatttcaatttatttaattacgttcttatcattgaaaagaacctcttgtttatacagaccgcagagtatatggtattcatcttatttttatgtatgatattatgctttataactgtattgcgcatacattacacacccatccagacagagattcatggcagtgagataaaacgtcataaacatggaatgcggaatatactgttaggtatccaattttttatatgctgggtttttgtcgcatttaccgtagctctttatatgcaagcggagaaaacggaatctaccctattcaacacattgactgaaaaagaaaaagccaatatactaagtttctccatagattatatgtttatgaagaatgaagagaaactggctttaatagaacgtatatccaaattttccggtgtacaagacaaattattggcagacatcagttatctgaaaggtatatcaggtactgggatgcaaatggaaaaaggtaacccggaaagcagttttgaagtaaatgtcatgaatgtttccactaacttcttccaattcatgaacatacctttactatcgggacacacattaaaagccaaagaggatttggtagtagacaaaacatgggcggaacgccagaaaaaagatctgttaggaactattttatacaattactcggaaagctataccatttgcggtgtatgtgacgattttatcgccgatgtatataatcaaagtcctggatttgtattcttacccagcgacttcaattattatgtaggtcattgctatctgaaatgcgagccgggggaaacggctgatataaaaaaaatgatagaaaagacattgaaagaaacactcccggaaagtattcatcctcatgtcactacattgcaggaagatatatatgaagcacaagcaatagaaaataaattgaaagggattattctattcttttctatcgtcagcctgctcattactttgttgggagtttattcgaccatcacattggatacggaacgcagacaaaaggaagtagctatccggaaggtaaatggagcaggattgaaacagattattttattgtttgcccgcctttatataaaactgctgactgtttccgcaattattgcatttccattaatttatatagtcatacaaatatggaaaaaagcatatattgtattctttaatgacggtatcatatattgggcaggaattttcatcggaataacatttattacggccctcacggtattattccgtattctgggaattgcacgaattaaccctgcaaaagtaatcaagaacgaataactttataaaatataagattatgatcaaaacagtaaacttacagaaaatcttcaaaacagaagaagtcgaaacatgggcattgaacaatgtcaatctagaaatcaaagcaggcgaatttgtagccatcatgggaccatccggttgtggaaagtccaccctgctgaatatcctcggccttttggacaatcctacgggaggcacttacgaactgaacggaacagacgtttccaaatttaccgaagcacaacgcaccaatttacgtaaaggggtcatcggattcgtgttccagagctttaacctgattgatgaattgaatgtattcgaaaatatcgagttacccttattgtatatggggattccggcggcagaacgcaaacgccgggtagaagatgccatgaaccgtatggctattgcccatcgggtaaaacatttcccacaacaactatccggcggacagcaacaacgtgttgcaatagcccgtgctgtagtagcaaatccgaaactgattctagcagatgagcctaccggtaatctggattccaaaaacggcaaggaagtaatggaacttctgaccgaactgaataaagaaggaacaacaattgttatggttacccactcccaacacgattccggctatgcagggagaaccattaatttgtttgacgggcaggtggtgaatgaaataaaaatataagtcaatttattatagaggtggtttaaccacctctataataacaaaaggatattataacaatgaacgtcttcttaaacatcaaacttattgcccgcaactggtggcgaaacaaacttttttttctgatttcgctattcagtcttacagctggattaggatgcaccaatctgcttatgactttttttatccatgaatataatgtggaaaaatataataccgaccgtaacctcatttatctattacgtcaagactctccaatggaagaaggtattaaagtagcctactctacctcagacgcagccacacagataaaagaaaaatatgctgaaattacagatattctgcgtgtaaacggaatgtctggtaatctttgcaaatataatggaacagatatcaaacagtttctttttatcagtgccgactctactttaaatcaattttttccttatacaacttcagaaggcagcctggaagaagtcctcacgactccggacaaagttgctgtaaacaaaagatttgcccaccaacttttcggaaatcattccggtattggagaaatcttggaaataatcaataaagaaggacaaagtaaaagttataaagtagcagctatattagaagatcgtccacaatcttttctgcattttgatttgctgacaggactatccgacaaatcatggggaggtcctgtattattgaaactacaaccaggtgcatctcccttagctttacaggaaaaaattaaaaaagacaagattccagcattagtaccggattcacgatattatattgatccgataaaagaactatactttaatacaggaaaagacagcaagcagcaacagttggcttttttccaacattgtgatgtattattactatatatcagtctgatttcggccctgcttgtgcttatcatcgcttgtttcaactatacaaatctgactctctcacgtaccctgcagcaacttaaaatgatacatatagaaaagctgatgggagcaaaatcaaaagaaatccgcagtcagttatttcttgatgcagcacttaccgttttatttgcattcctgttatcattattgcttattaatgacatgctgccgtggtttaacaacctgttgtctacccgtctttccttctctttctttttcagccggcaagttctacctttacttttatccttcattttcctcatggctgtcattcctggtctgtatatcagccataaactctctcaacagactttgagcaagtatcggcaagcttatacaggaaagaaaaagcaacaatttatatggttgcttgttaccatccagtttatattttcaatcgggttagtgtatgcaaccactcttgcacaaaaacaaatggatttaatcaaatcccgtgcataccattacgaaaatacaatagaaatagggagtggcacccttcctctgtttccgctctatcaggaactgaaacaaatggatggaatagagtctataagtctttccatgagttctgtactttactgttggcttcgtgaacttcctatccgacaaacagacggtagtatccaacataattctatagcacacatccctaccgacacaactttcttccaaaccatgcatatccggcaaattgccggagtatctccctcccaagcctgtcgggaatatactcatccggcttttatcaatgaaaagcttgcgcgtctgctgaacatagatatttcccacataggtcataaactaaatgaatttgatgaattctcggattcattaagtactattgcaggtattttcaagaacttcccattaaactccctggaagaggaaatcggtggtcaacaaatatctattggaacagaacaagatttaattcagaaaggaacattcatacaaataaaactcattcctgaatattataaagaaacattggtatctattgaaaaattatggaaggaaatgaatggtgaaagaggtttcaaatatgtagatatgcataaagaatttatgttgcgtaataacaaagtaattatactctcccgaatccttatcagctactcatttattgcattggccctgacctgttttggcctgttcggtatttcatggtacgctgtacgtcatcgtacccgtgaaattgcaatccgtaaagtgcacggtgcttccaattgggaaatagtatggttactaaaccgttcgtttctatggcaaatactagtagcatacatcatcgctattccgataacgtggttattaatgcaacattggctggagcaatttgcttatcgaatttcagccacacaatggaatttcctgacccctgttcttattgtattggtaattacaaccattacgataacaatacatagttatctcagtgcacgcactaatccggtaaacagcctgaaagctgaatagcaaacgtctatgtatatgttctcttttgctgaaaaagaaccaagcttacagaaatcacaacaaggattatgcccaaagcactgtatgtagtaaagagttctttgaatacaaatacccctaccaggactgccgtaagaggttccaatgcacccaataaggaagtcaacgtcggtcctgccaattttacagccttcaccaacgtaatattagagatcgcagttgcaggaagtgccagtcctccgatatagagccaagtgattacattggtttccaaacggaccccctcatcatagaaaagtcctcccagcaaaaagaacaaggctcccagtcccatcacataacaagttaataccgtagaattaacttccactgctctggtttttcttatacctattatataaccggcataagagaaaaccgatatgcaggccgctatcaaccccatcattctatttccaccattatattctatatttccggaagataataaagatgctcctactaatgataaaacgatagcagcgaaagtcacaatagactttttttctctaaagaaaacagccattgttactgcaacagccagcggatacataaaatggatgatagaagcaacaccacttgcaatattctgataagctatgacaagactgaacgaagtaagcgcacgcagcaagctcagtccgaaaattgttttaaaatctttataccctatatgaaaatcacatttggtaagaaaagcaaaaacaagcaagacaactgtagcaactccccaacgataagtcagcacttcgaaagaagaatatccaatagccaacaagcttatggaaaaaaacggtgccaatccgaaagtcgcagaagacactgctgcatataaaataccttttatccgattcatgtccttttcaagtaaagcggatacaaagatagacaataatacataataaaaaaacaggttgcctttgtaaaggcaacctgtgatatcttactttatgatttccaacttcttaaagcatttggtcagtttatccacagcatagtcaacttgttcctttgtatgagtagccatcaaagcaacacgcaccaaagtatcttgtggtgcacaagccggtggaataacaggattaataaatataccctcgtcaaatgccagtttagtcacttcgaatgtcttatccgtatcacgaacataaagtggaataatcggactttcagtatcaccgatttcaaaaccggcctgacggaaacaatccaaagcataatttgtaatcttccacaaattctcacgacgttcgggctcactcttgaggatatgaagtgcagcacgtgcagcagctgttgcagcaggagtattacttgcagagaatatatatgaacgtgagttgtgacgcaaccagttgattgtatctttatccgcagcaacaaaaccaccgatagaagccagtgactttgagaatgtacccataataacatctacctgatctgtcagtccgaagtgatcacagacacctcgcccgtcacgaccgaacacacccaagccgtgtgcttcatccaccatgatacttgcattgtatttgtctttcaaacgaacaatctcaggcaagttagccaaatcaccttccatagagaaaaccccgtccaccacaatcagtttcacagattccggtttacacttctgaagttctttctcaagggcttccatatcattgtgcttgtatttcaactgggtggagaaagaaaggcgacgtccgtctacgatggaagcatggtcacggtcatcacagataatgtagtcattgcggtctgtcaggcaagataccacaccctcatttacagtaaaaccggtagaataaaccaatgcatcatctttccctacgaattccgccaattccttttctaactgaacgtgcaggtcaagcgtaccattcaagaagcgtgaacctgcacaacctgtaccatatttacgggttgcagcaacagctgcttcaataatccgttcatcgtaggttaaccccatatatgagttggagccaaacatcagcacctttttaccatccatgataacctctgtatcctgatggctgtctatctcacgaaaataagggtaaacgcctctttccatgtatagttgaggcaatctgaatttacttaacttgtcttgtaataatcccatatcctattgtatatgtaagcctcgtcggcctactttaaaataatgtatataaactcactaatacattctgttttcaaggtgttcccgtcaaaacaggctgcaaagatagtaaattctacaaccgattgtactttttttcaaaaaaaatatttaggggcatcaaaacttttaggatttagggcagttataaacaaaatgtattacttttgcgtttaataaagagctaaactaccaaagtaaaagtatgaccacgaaaaagaaaattgtatttgtcgttaatcctatctcggggacacaggggaaaagagccatattaaaatggattgacgaacgtataaaccgtacactctatgattatacgattgtcaaaacacaatatgccggccatgctgaaaagattgcggctacagctgccaaagagaaagtagatatagtagtggctattggaggagatggaactataaacgaaataggacgtgcgttgatacatacggatacggcattaggcattataccttgcggatcgggaaacggactggcacggcatttacaaattcctttggaacccaaggctgctattgacattataaacgaaagttctgttgcctgtattgattacggaaaaataaacaatataccctttttctgcacatgcggagtaggttttgacgcgtttgtcagcttaaagtttgctgattcaggtaaacgcggactactaacctatctggaaaataccttgcatgaaagtctgagttacaaacctgaaacttatgaaatagaaaatgaagaaggaacggtaaaatacaaagctttcctgatagcctgcggcaatgcctcccaatatgggaacaacgcatatattgctccacaggcctcgttaaccgatgggttgatggatgtcacaatattagagccgttcacagtgctggatgttccttctttatcttttcaacttttcaacaaaaccatagaccaaaacagccggatcaagacattccgtactaaaaagattaaaatacatcgttcaaaacccggagttatgcattatgacggagatccgatcatgggaggaaaagatattgaggtagaattgattccacacggactcaacatcattgtttctgataaaaaaaaagagaacgaaccttttagtctcttacagcaaatatccgaaatattcagtggtatgaaacctaaagctgaaacttttgctttccggcacagccatttatttgaacttaacaaaagtttattgcgtcgtctatccaaaaaacaataaaaaatatcttttttctgaacatcagtaaagactctgcaaataaaaacagtttctttatgatgttcagaataatccgctctctacatgttcagatagaattctttagtcaaggctatatattcttcactatacacatgacgtgataattcgatggtcaaatcgtctgtaacacacttatccacagagaatttgaaagcaagcagcacccgtttgggctccgatccaggttttgtatgaatgaaagtctgatgtgagagatgtaatccgtaacgagtggcagccatcaaaaaagattctttaccatcagcaggaataatcacagaaaaaacgccttcgggatgaagcaaacgggctgcagatcctgctaatttgtcaaaatcaagaaattctgtatgtcgggcgatattacgctgtttccctgggcatttcaatgaatcggtaaaataaggaggattggaaacaatgacatcaaagagtgtttccgatgtaaaatgacaaatatcctgcaactccacttctatcctatcctgccacggagatgccgccacatttccacgagcctgttccacagcatccgcatctatatcaaccgctcttatccgggcattgcaccgctgtgccatcatcaaagaaatcaatccggttccagtaccaatatctaaaatattacgggcggaaaccacatcggcccaagctcccaataaaactccgtccgtaccaaccttcatggcacatctatcatgataaacagtaaattgcttaaaagaaaaataaggatttggcatactatatttattaaattagctgtcaaaaataggaaaatccatttaattactccaattattaggaaatatttgatttttaaaactcaattagttcccatgaattttccttattcgacaaggaatgattaactttgtccccgttttgggcattgggctcaatttaacacaagaggaataaattatgaagaggaataagaaagaggatattttgttgaatactgataacgatgacatctctatgttagctgaaatccaaacggatccggatgaagtaactgctatggaatttaataaagaaatacctgttatgcctttacgcaacatggtaatgtttccatctgtagtaatgcctgtgaccattggacgccccagcacattgaaattgataaatgctgcatacaagaaaaaacttcccatagcggtagtttgtcagatacagggagatatggacgatcccggttttaatgatgtgtaccatgtaggagttatcgggaagattctccgtgtattcgaaatgccaggtggaaataccacagtaattatgcagtcaaacgggcccaaagtacatttggacagtatcaccaaaacgtctccatatttaaaagggatggtgactcctattccggaggcaaatgaccaactggaaacggacgaattcaaagcattgattgacacctgcaaggatttgacgagtaagttcatagaggcttccgagaagatgagtccggatacggtttttgcaatcaagaacttggacaatccggaaattttggtaaatttcatttgtgcaaacttccctattccggtagaagaaaagataaaattgctaaaagctggcgatttgcaaagccgcctgtatatgctggtcaagatcttaaatcgtgaagtacaattggctgatatcaaacaaagcattcaaatgcgtacacgcgaagatattgaccgtcagcaacgcgaatatttcttgcagcaacaaattaaaaacatacaggatgaactgggtgccggacaggaagatgaaatagatgaactccgccaaaaaggaaaaaccaagaaatggagtccggaaatggcagaactctttgaaaaagaagtttccaaattggaaaggacaaattcccaatcaccggatttcaatgtgcaacttacctatttgcaaaccctgttaggattaccttggaatgtctttaccactgacaacctgaatataagtaatgccgaaaagacattgaacaaagaccactacggactagagaaagtaaaggagcgtatccttgaacatttagcagtgctgaaactaaaaggtgatatgaaatcacccatcatctgcctttatggtcctccgggagtcggtaaaacttctttagggcgttccatagcggcatcattgaaacgtaaatatgtacgtatgtcattgggtggtgtgcatgacgaagccgagatccgtggccatcgtaaaacttatatcggtgccatgccgggccgtatcatcaaaagtttgataaaagccgagtcctctaatccggttatcattttggacgaaatagacaaactgggcagtgaccaccgcggagatcccagttccgctatgctggaagtgcttgatcccgaacagaacaacactttccacgataactatttggatgtagattacgacttgtctaaagtaatgttcatcgctacggcaaacaatttgagcaccatccctcctgctctgctggaccgtatggagttgatagaggtcagcggatatatcacagaagaaaaagtagaaatagcccgccggcatcttgttcccaaagaactggaagccaacggcattaaaaaagaatatgtgaagttctctaaagctgccttggaatgtattgtagaaaattatactcgtgaaagcggggtgcgcgaacttgagaagaagataaacaaggtaatgcgtaaaatagcgttggaatttgcacgtgacggctatgaagtgatgcatgaaataaaacctgccgatgtacgcaaatacctgggcacgccagaatatagccgcgacaaataccaaggaaatgaatacgccggtgttgtcacagggctggcgtggacagctgtcggaggtgaaattttgtttgtagaaaccagtttaagcaaaggaaaaggcggtaaactgacattgaccgggaacttgggtgacgtaatgaaagagtcggccatgctggctttggaatatctcaaggcacataccaaactgctgaatttacaggaagatatctttgacaattggaatatccacatccatgtacctgaaggagccatccctaaagatggtccgtcagccggtatcaccatggtgacttcattggcatccgccctcacccagcgtaaagtgaaagcaaatctggcaatgacaggcgagattacattacgtggaaaagtcctgcccgtaggcggtatcaaagaaaagatcctagccgctaaacgcgccggaatcaaagacatcattttatgtgaggaaaaccgcaagaacattgaagaaattcagccgatgtatctggaaggactgacattccattatgtcacggatattaaggaagtattggctttggctctcaccaatgaaaaagtaaacgatgccattgattttaatattaccaatcaaaaaacagaagaaaagaaataaatatgacttttgacttacaatatacagaccccaaatcgaatgcccgtgccggattgataacaactgaccacgggcaaatagaaacccccatctttatgcctgtaggcacattgggaacggtgaagggcgtgcatttacatgagttgaaagaggacattaaagcacagataatcctgggcaacacttaccacctgtatttacgaccgggactggatataatagaacgtgccggaggtctgcataaattcaacggctttgaccgtcctatgctgactgatagtggtggttttcaggtattctctttatcaggtatccgcaaaatgagagaagaaggtgtggaatttcgctcacatatagacggttcgaaacacctgttcactcctgaacgggtgatggacatagaacggactatcggtgcagatatcatgatggcttttgacgaatgtactccgggaaccgcagattatgaatacgcaaaaaaatcaatgcagcttacccatcgttggctggaccgttgcataaagcatttcaacgaaaccgatcccaaatatggttatcaacagtcattatttcccatagtacaaggctgtgtctatcccgacttacgcaaacaatcagcggaatatattgcctccaagggagctgacggaaatgccatcggtggcctggccgtaggtgagccaaccgagaaaatgtacgaaatgatagaggttgtcaatgaaatcttacccaaagacaagccccgctatctgatgggagtcggtacaccggtaaatatactggagggtatagaacgcggtgtagatatgtttgattgtgtaatgccgacccggaacggacgcaatggaatgttgttcactaaaaacggcataatgaacatgcgcaacaagaaatgggaggatgattattctcctatcgaggccgaaggagcatcgtatgtagataccatgtacagccgtgcttacttgcgccatctgttccacgcacaagaactgctggccatgcaaatcgcttctatccacaacctggcattctatctgtggctagcaggcgaggcccgtaaacacatcattgcaggagatttctctacgtggaaaccaatgatggtaaaacgcttatctacaagattataaattactagaaatgaagaattggttcaagacaaacacagattcatccccaaaggataaaaaatggtggaagccgaatatcagttggctgaaactggataaatgggtgaaaagactggacatatatatcattaagaagtttctgggaacctactttttcgctattgcattgattatctccattgcagtagtatttgatgtgaacgaaaatatagacaggttcatcaataacaaagctccgctgaaagcgattgtatttgattattacatgaacttcatcccctacttctccaatctgttcagccccttgtttgtctttatcgctgttatcttctttacttccaagctggcagaaaactcggaaatcattgccatgttctccaccggaatgagttttaaacgaatgatgcggccctatatgatttcggccgcaatcatttccgttgttactttcggactgggagcatacgtcatacctaagggaaatgtaacccgtttggattttgaggaccgttataagaaaaaaaagaagcaggaatatgtgcggaatgtgcaactggaagtagacagcggggtcattgcctacatagaacgttatgaaaattataataaaacgggataccgtttctctttagacaagtttgatgacaagaaactggttgcccaccttactgcccgaagtgtcacttatgatacagcatctgtacacaaatggacaatcaagaactatatgatacgtgagatggaaggtatgcgtgagaaaatcactcggggtgaccgtttggatacgatcattaaaatggagcctcaagattttctgattatgaaagggcagcaacaaaccatgacaagccctgaactgaaagaatatatagacaagcagaaaagacgtgggttcgccaacataaaggaatttgaaattgaatattaccaacgtatagccatgtcttttgccgcttttatcttgacaaccattggtgtttccttatcatccagaaaaatgaaaggaggaatgggactgcatttaggagtagggttagcacttagtttttcatacattttgttccaaacagtgtcagcaacctttgctgtcaacggaaacacccctcctattatagcggtatggattcctaatatactttacacatttattgctatctatttatacagaaaagctcctaaataatcataggagcttttctagtttttgacgccaatcctcgccgttctccggttgcatcgtaataaagcccagttctttaccaataacaatattggccgcaccgtcatctacaaatattgtttcagccggattcagtttactatctttgatcatatagttaaagatgccaggatccggcttggtggaaccggcttcgtaggaagtataaatcttgtcaacataagcgtccaatggctttcccgcagaagtaaatgcattgctcctcgcccatcccatcacataaggattggtgttgctcaatatatataccttgtacttcttacgaagttcattcaggtaatccaatttatattgcggcacgtccgtaacaaatcctttccacccattttccacgtcttgataagtcaattctttcccgcagattttactcaactcacagcgaaaagtctcagcgtctatgtttccattttctacttcctgaaaaatcccctgctggtggtatttccctaataaactgtccgcttccctcactcctatccgctcaaatgcctttacagcctgttcacgatcaaggccaatgacaaccccgccgaaatcaaacacaatattcttaatctgtttcataatctttttatttatccgctgtaaaggtaggcatttgatcgtgaatggtaaatgatgtaagtcaataaaataccatatagcaaaaaaaaccgcagattccattgagaatccacggtaattatttttgttgtatttttcttcctttcggaaatgttctctcaattcaaataagaagagagttcggatacggtgacatccttggcaacgataacaccattttcatctaacaaaaagttcttaaagcctcttttcaagcgataagtctgatatagatccgatgaaacaccagccaattccacaaaacaattagaagttgaaatctggtcttttttaatggtctcgttaaatatcgacttgtattcatcaaatgaaacggaaaccatttctacattgtcggcctgcgcgacggcatgattcaaagtagcattctgcatccttgacaaagcatcatagctggcccaaaaacttagcagtacatatttacctcttaaatccttcaagtcaatcaactgcttttcgccacagatagtaaatgtaggagccttgtctcctatggtcaagccttctgtcggcgtgtttttccctacaaaagagaatgaaatcaaggaactaataattaatacaacaaaaatccactttacatttttaatcatgtaattcgatcttagttaatactatccgagactgcccttaaacagtgatttccacccggaacattatctttagtactgataatcaataccatttaaattggaaatctgcggcaaaggtaaggagttttgaaattaactccaagattttttctcaaaaaatatgttatatagcataaaatcgtccttttcatcgagaaaaaagaatgcagaaaatatagctgataaggatttatttacgtacttttgcaatctgtaaatagcaaccacaaagtatgaataataatactgaacttattttaatcagaattaccggtcttgaccggccgggattaaccgcttccattacggaaattttgtcaaaatatgatgttaccattttggatattggccaggccgatattcatagcaccctgtcattaggcattttattcaaaagccaggaaaaagattcagggaatatcatgaaagagttgctatttaaagcttccgcattaggcatcaatatccgtttctatcccgttactgtggaagaatatgaggaatgggtaaacatgcaaggcaagaaccggtacatcctgactttactgggacgcaagctgacagccaaacaaatcgcggcagtcacaggaatattggcggaacaaggtttgaatattgatgctatcaaacgtcttacagggcgtattccattggatgaacgaaaagcgaatgtacgggcttgtatcgaattctccgtccgtggcaccccccgccaaagggaagagatgcaacaggcgttaatgaaactgagcagtgacctggaaatggacttttctttccagctggacaatatgtaccggcgtatgcgacgcttgatttgttttgatatggattccacattgatacagacagagtgtatagatgaattagccgaacgcgccggtgtgggtgaccaagtacgagaaatcacagaacgcgccatgcgtggagaaattgatttcatagaaagcttcacagaacgggtggctttgctgaaaggactggatgaaagcgtaatgaaagaaatcgcagaaaaccttcccatcaccgaaggtgtggaacgtctgatgttcgtgttgaaaagatatggttacaaaatagccatcctatccggtggattcacctatttcggcaattatctgaaagataaattcggcatagattacgtatatgccaatgaactggaaatagtaaatggcaaattaaccggaagatatctgggagatgtagttgacggaaaacgtaaagccgaactgctgaaactgatcgctcaagtagaacgtgtggacatagcacaaactattgctgtaggagacggaacgaatgacttgcccatgttgtccgaagccggtttgggtatagcattccatgcaaaacccaaagtagtggctaacgcacaacagtccattaatacgatcggattggacggcgtcctctatttcctgggcttcaaggactcttacctggaagaacgcggcaaactctaaagaaagaagtaactatatatatgaaattttcagaactaaatttagaagaaggggtgcttcaggcattagatgccatgagatttgaagaatgcactcctgtacaagaacataccataccggtcattcttgaaggaaaagatttgatcggagtggcacagaccggaaccggcaagactgccgcataccttttgcccgttcttaatcaattaagcaaaggcggatatccggaagatgccatcaattgtgtgatcatgtcacccacacgcgaattagcgcaacagatagaccagcaaatggaaggtttctcttattttctaccggcatccagcgtggctgtttacggaggaaacgatggtgtgcgcttcgagcaagaaaagaaaggtttaactttgggggccgatgtagtcattgctactccgggacgtctgataagtcatctcagcctaggttacgtagacttgtctaaagtttctttctttattcttgatgaagcggaccgtatgctggatatgggattctcggatgacattatgcaaatagtgaaatatctgccgaaagaacgtcagaccatcatgttctcggccactatgccggctaaaatacaacaattggcaaaaacgatcttaaacaatccggtagaaataaaattagcggtttcaaaacctgcggaaaagattatccaaacggcttatatctgttatgaacgccagaaattgggaattattcaatcccttttccaggatcaaacacccgaacgtgtcattatctttgcctcttccaaattgaaagtaaaggaggtgacacaagcattcaagcggatgaaactgaacgtaggtgaaatgcactcagacttggagcagtcccaacgggaacagattatgcgtgaatttaaaagtggcagaatcaatattctgattgctaccgatattgtttcgcgaggaatagacattgacgatattcgtttggtaatcaactacgatgttccacatgacagcgaggattatgtacaccgcatcggccgtacagctcgtgccaaccatgatggttgcgccattacttttgtcagtgagaaagagcagacccaattcaaagctattgaaaatttcctgggtaggaacatctataaaatcccggttcccgaggaattgggagaagcgcccgaatacaacccgcgaagtggcgccggtcgtagcaatcacaaaggtggcggctccagaaaacaaggcaattataaggggaaaaagaacggtacgggcaagcccaatgccaataatagaagaaacaccccaaaagaatagacggaagagatgatatctaaaaaccattggaggaagacggacttgttttcctccaattttattttatggagagggtcacttcatggctcatctgcaaaatagatgcgaggcaatcacaaacatccattatatgtattgcttgtaggatatataatctttcacctgtaacattactaaccttacaccccacacattagtaacgtatggggtgacacgttactaaccttccggcatgtacgttactaacctctcaaacgtcctgttcttttcagaaaagaacaaggtctttaaaaaaaagaacaggacgttttcattgaaagaacaagagctttttaaaatttgacctgttgttttttccataacggcatctacatgccgaaacgccttatttttccttcagatctttcagccattccgcaaacgccctgcccatcggcattccggctgaaggatatgcattgtgaaatgtttcagccggaaaatatccttcaggaaaaccaattccccaagaatcggaagaataccaatccggctgaaggattccaatctccggctgaagaattcccaagcccaatccttcagccggaataccgatgggcagggcatttgcgagcaggctgaagcttttgaaggatttttcagggtattctctatagagcatgatagcgaccaaatagtaatcgcgaaataaaaaaaatgacatagccaccacgactaccttaccaactcgaatgcaagtcctccatccttgccggcagtgatattgaccatataacaagacgcgccgtcaggtatgcacaccgtggcctgataatgataccctttcgaatcgacccccataaaatccatatccgacaatatagcccattgcaagaaatcatccggaaccacccccttgaacatctgcttggtgatatctttggcataaagactcttcctgccttcatacacgcaaatgtgtatgatattgtcataatatacattatccaccccaagtccttcctccgaaactcccggacgcattactttaatctttgacgggttaatgtacacatatccgcgataacggacattatcgtatgtcaccaccgaatctttcttaataacttcattataaacagggatttcccgagtatggataaatgccagagaatcattctccgtatcagacttatgcaggcgtatcacatctcccacagccgaatgaaaccaaaaaatatgctccccctgcttctcaatcttataaccattagtccgtgcaccatacgtaatcaacgaatcgcctataattttaaaagcaacgggagccgtagcggcatctgcataaaacagggtatcgcctttcaccctcagtaatgccgtttccgtattatcgtccaaccatataccttccaacaaagattttgcctccttgttttcttccagagcggatgctttttgttgcggagttccacaagaagacagcgcaacagccaacattattatcgaaaaacgtttgtacatggttattctctctatttttttatttatcgaccgatgcaatgataaacaaaccccatttcctgtagttcgtcaccatcataaatatttcgtccgtcaagcactacaggctgcttcatcgccttcttgattactccccaggtaggaagacggaactctttccactcggttaccagaatcaacgcatccgcatcaagagccgcatcatacatatcgtgcgcataataaaccgactctcctatccggcggcgggactcatccatagcagcaggatcgtatgcgcggacattgcaacccgactgtttcaatttctcaataagtaccaaagccggagcctcacgcatatcgtccgtaccgggcttgaatgcaagtccccacaaagccactgttttgcctttcaaatctccattgaatacttttaccagtttctcgaacaaaatgcctttctgattctcgttcacatcttccaccgctttcaacacctgcatggaataaccattctgctcggcagtcttaatcaacgccttcacatctttcgggaaacaagatccaccataaccgcatcccggatacaagaacttacgcccgatacgactgtcggaacctattccgtcacgtaccatatttacatcagctcccaccagttcgcacaagttggcaatatcgttcataaagctgatacgggtggccaacatggagtttgccgcatacttggtcatctcggcagaaggaatatccatgaagataacgcggaagttaaccagcatgaaaggtttataaagcttggtcatcagttttttagccctttccgactctacgcccactaccacacggtccggactcataaagtcatcgatagcattaccttctttcaagaattccggattagaagccacatcgaaatctatcgactcccctcttttctccaattcctcccggatagccgcttttactttccgggccgtacccacgggcaccgtactcttggtcacgaccaaggtgtatttcttcatattagcaccaatcgtcttggcaacttcaagcacataacgcaaatcggcacttccgtcttcatcgggaggagtgcccacagcactgaacacaatatccacattgtccagacaactctctaaagaggtggtgaaatgaagacgtccagcctttacattacgcaagaccatatcttccaatcccggttcataaataggaataataccctgttgcagattagcaatcttatccgcatttacatctacacaagttacgtctacgccagtttcggcaaaacatgttccggtaacaagtcctacatacccggttcctacaatcgctatattcattttatttaattcgttagtctaactttttcgctgcaaaattacaataaattatgagtgagttgttattttcttccataaaagttgcgctgaaacggaataaaaatgctaattttgcgatatgattgaattggctagacatatagaaattctgttactggaaaatgactgtgtgattattccagactttggcggttttatagcgcactatcaaccggcacggtatatcaaggaagaaaatctttatcttccccctgtacgtactattggtttcaatccccaattgactataaacgatggtttattagttcaatcgtatatgcaagcccatcacaccgattttcctgatgccacacgcatgatagaagaagaggtagccggattgaaagaacaactataccaaaatggatgtgcagaaatgcatggcataggggtcttacattataatattcatagcacatacgagttccatcccaatgaggacggtgcattatcacctaccctatacgggcttagttcgttttccatcaacagattagaatatcttacttcaacaacatctgcagcaaccagagaattacttccccgacaagaaaaaaggaagagaacagtacgtttcaaacgtcagtggataggaaatgcagtagctgtggctatagctgtagtcttatttttcttcttgtctgttccggtagagaacacatatgtggacaaaggtaattatgcttctttaggtacggatggtctgtttgacgccattcgttcccaatctttggcaacgaccttggtaaccgttccttccagaccgcagcaacccaagaagacgaatatcaaaaataatcaaaacacgttgaaacctgtaactgtaaaagtagaaaaggtaggaaaagcacaagaagcagtgcccaagaatactgttgcagcaaaattgaacagcacagaacagccagttgccaagcctgttactgtaagtaaacctgcccttgagaagaaagaaacagcaacaccttcgagcagtaaaaaaaataagtattatatcatcgtatccagtttaccgacagccaatgacgcacagcaagtacttaatgagtacaagcaaaaaggatacaaggatgtaacaatcatagaaggtaacggacgttatcgcctgtctttgtgcaactttgcagataaagccgctgcttataaaaaattaaatgaactgaaacaaaatgatgcattcaagaatgcatggatattgagttccaaataaacaagattattttttatgaaaagagttttgtgtcccaaatgtgacaactatataacttttgatgaaaccaaatatacagaaggccagtcgttggtctttgtatgcgaccattgtaaaaaacaattcagtatccgtatcggaaaatccaaactgaaagcaacccgtaaagaagaaatattggacgaacaagccaataaagaggattttggaagtatcgtggtagtagaaaatgtattcggatacaaacaagtattacccctgatggaaggtgacaacctgataggacgcagaagcaaaggcactgaagtggacattcccatcgaaacatcagatccgagcatggacagaaggcattgtatcattaatgtgaaacgcaacaaacaaggggaagtcatttataccctgcgtgataatgacagcattacaggaacatttctgatgaacgagattttggggaacaaggaccggatacggatcgaggaaggcgctatcatcacattaggtgcgactacgttgattctgcgtgccaccgagaagtaagacaatgagacgtattatcttaatcacaggaggccaacgttcgggaaaaagttcatacgcggagaaattggcattaagcttatcacccactcccgtttatatagctacttcccgtatttgggatgaagaattccgccaacgcgttatcaaacatcaagaaaggcgcggaccggaatggacgaatatagaagaagaaaaagaactgagccgccatcaagtaaaggataatgtagtattgattgactgtgtcaccttatggtgtaccaactttttctttgatttggatgcggatgtagaggctgcattgcaggctgtcaaacaggagtttgataattttatccggcaagatgccacttttattttcgtaaccaatgaaataggttccggagcagtatccgaaaacgccatccaacgccgctttacagatttacagggctggatgaatcaatatatagcttcaaaagcagaccaagtatatttgatggtatcgggaattcctgttcctataaaataataaatacaatgaaaaactttcatattgagtatcccgatgaaggtcttcgggaggcattgatagacaaaatcaacaatttgacaaagcccaaaggttcattgggcgttctggaagaccttgcattgcaaatcggattaatccaacaaaccctctcccctacattaagccatccgcacaacgtactttttgcagccgatcatggtatagtagaagaaggggtaagcaagtctcccaaagaaatcacttggcaacaactaagtaattttttacatggaggtgccggagttaattttttatgccgccaacatggttttaagcttgtattagtagactcaggagtcgattacgatcttccttacgagaaaggcattatcaactgtagcgtaggacgtggcacgcacagttttctaaaaggtcctgcaatgagtatggaagaaatggaattatgcctggaacgtggagcaaagataacggatatgattcatgctgacggctgcaatgtggtcagttttggcgaaatgggtattggcaacacctccccttcctctgtctggatgcatttgctgacaggtatttcattagagcaatgtgtaggtgcgggaagcggactggattcagaaggcatccgccataaatacaatgtattgaaacaatcggttgaccattatgccggtgacggttctgcaaaagatatcatcgcctggttcggaggatatgaaatggttatggcaataggcggcatgctccgggcggcagaattaagaatgattattctggtagacggcttcatcatgaccaactgcatactggccgcctcaaaacttcatccggaagttttgtcgtatgccatattcggacatcagggagatgaaaccggtcataaactagtattggacgccatgaaagtacgccctttattaaatttaggtctgcgcttgggagaaggaacaggagcgatatgcgcttatcccatcgttgtttcctctgtaaacatgatgaatgagatggacaatttcgcccatgcctccatcactaaatatttttaaccatgaaactgcttgcctccctcatttttttcacacgccttccgttttggaaaatagctgacgtaccacctgtttactttaaacgagtagtggactactggccctttgttggatggctgacaggaggtatcatggcaggcactctatggatcacagcagaatttctgcctgtacaaatagctgtgctcatggcgttggctgcccggttattagtaacaggtgctttacacgaagatggattggcagacttctgcgatggcttcgggggcggtacatcacgtgacaagattctgtccatcatgaaggattcacatatcggcacatacggagtgctcggattattattctattatggattgatgtggaatatactcaccacactttctgtacccttggcatgtgcggccatattaagcggagatgcctggagcaagttttgtgccgcacaaatcatcaacacgcttccatacgcccgtaaagaagaagaatcgaaagcaaaagtcatatatgaccgtatgagcccaggtgttttattatccgcttttatggccggagccctacctatgcttttattactggataaaggatactggtgggcagccatcgctcctgctatgatgttcatccttttaatgtcactcatgcgcagacgcctgcaaggatataccggtgattgttgcggagcgactttcctattatgtgagttttctttttatctgactataaacttaatctatacaaatctatggtaatatacttcatgcgtcatactgctgttgatgttccgcaaggcgtttgttacggacagacggatgtacccttaaagccgacttttgaaatggaggcaactcaaacggcagcccatttacaaggcttatcttttgataaggtttataccagcccgttaacccgttgtgtacgcctggctaccttttgcggctacccggatgcagaacgggacgaccgcctaaaggaactaaatttcggagattgggaaatgcatcggttcgatgaaattgccgacgctaatctggaaagatggtatgcagattatctgcatgtaaaagcgaccaatggagagtcctttgaagatcaataccggcgtgttgccgattttctagacgaacttcgccaaaaaccgtatgaacaagtcgcgatctttgctcatggcggcattttactgaacgcacagatttatgcaggtatcattaaacccgaagaggcgtttggcgcactcactccttatggaggaattgtcaagatagagttatcatgatgtaagaacatatcgcttatttatttgttctattcataaagacaaataaatatgcttactcatttcttggatttattagcagctgttataagtgtgacaagccttttgattgtcacatacggagcgttgataggtatcatctcttttttgaagaatgaaatacgacgttttaccggagggtattccattaccaatatacgaaaattaagagctacattcggaacttatctgcttcttggcttagaatttctgatagcttcggatattttgaaaacagtattggagcccactttgaatgaattggccctattgggaggtattgttgttttaagaaccatcctatccgtattcctcaataaagagataaaagaattggaaagtgaagaaaaataaaaaagcactgaaaaactaatcatttatacatattggctttttaagttgcacacacattgcatactttcatatttttgtcgatgaaagaaacatcttgatttacttactaaataatagaagaatatcatttattgttttcaagattctctccgatttgttggagcagtctaaaagctccagccatcttatagttacccaaacattgtttagcctgcatgatgcaactttcaacagtaagtttcaaatttggtgtgaaagcgaatttatttatctgcatttccttaggaagttcattggcatgattattgagccatacgatcatttcatttaatttctcttcggaataagatttctttttcaccatgatacataaattcatgtcaactgtgtacaaaaataaaagaacatataattcacgcgctatcttttaacaaaaatattgttgaaataaaaccgctcccacttatcacaagccggaacggttcagattagttacgttttgacaatctactttattcttcaagaacaaaacaatgacgaatttgttcaaaaggatttgcctatttctaaaaatattttttgtcacattattgcgtattacaatagatccccaaaacaaggagtaatttttgttatgagattggcttctaccccacaatacaaggcaaaaatacataaaattctattctcttcagttgattgtgtaatccaattgggaaattgtatttaaacaaataccccgactcatcacgagccggggcagtccaatttataaatttaaagtcttatgatgaagattgtctgttgcgccaatgttttactatcagcacaacgacaaacaaaacagttacacaaacacaggtaaagcctttttgtttaagcaaagtggattcttttttatcctttatgattctgaccgtttttcctcatggatatcggaagtggtttccttgtcggctttcacctccgtacagtctttggttgtagtttccttctttctattcttgctgaaatcaccttctacgtgaccgtcagccagtaacaaaactttcctggtcgggctgtcagacggttttcttgtaccataaatccgaaaattaatcacgtagttgccattggttgcaatcagttcattcaaagagatgatagagccatatacgatgttgaccgacttacgagtgctgtcctttctacactcttggcagtacactggactatacgcttttccaaccagtcaacctgcttccgctcgttctcattctccaccgaatcggcagacgcattctccttccgtgcgttttgcggtttacacagaatatgaatcccagcggacagcttccaatcccttaaagccccagttatagccaaccagtcatttaattccattctgcctattgtttatctgattgattataaaatacacacttaaaaatcctatccgcttgcaccatcgctgccaaaacactaaaatccattgtcacgatatgtcaataaaaaagactctgcaaaataagaataaaaaacgatttaccaaagaagaatataaatatattgaatcggtctggaatgtaaaaaattatattacaggccagcatcattttttagttaattttgcaccaattatttaataaatatctgataacattagtttaaaaagcgttatgttcgtcttgtaaatcgggatatatggattctccaaatgagaagggatagtatgatttttcttacatcataaagtaaatctgacggcatcacacctcatatcggcgagaacggtaattggtggataggtatgactgatacaaaaataaaggcgcaaggagccaaaggggacgatgccattgccccccaagttcaaatcaacgccacgacaaatgaatgggaaatctcaacggatggcggcaaaaactggaaatcgacagggattaaggcgaccggggagaaaggcgacagaggtgatgcggtatttgcggaaaacggagtggactacacaagtgatcctgataatgtcatattcactctggctgacggaaagaccaagctgaccgtaccacgtaccaaaatattatctgtcaagttcaaggatggttgcgatattttctcggtaacttccgttagtaatacaattgatattgaatttattggtttgacaacagaaaattataaggctttggttgcggaattgagaagcgaggacggtactacagatatagagattgtgccccgtgctgaaaataaggatgtggaaattaaggaacctgtatttacggatgggaaatgtaccggaacgacagtcaaaatcaacaagaaaggaataaatggagaaaaggccgttctgaaagtgactcttatagataacaacgggcaggaaatttcagtttcccgtatcgtgaaattctttggtgcgggtgctcttgatgaagccgcccagaacggaggtagctttatattgtctgatgacattattctggagaaaccggttgaggtggcaaaagggaaggaacttgtattggatctaaacggtaaaaccatctctaatttctgaacggataagcatccgcgtgcatatatccctggttgattgcctcattgaccaagatacggagctgtttcatgtgcttggctatcgtattgtccgcattgcccttttcccttaagtattgctcaaaatcacgaaggaatgtataggtaatatccttgaagtccaatccggaacggaagtcattcaagaccgccagtgtagagtgcaggttgtccttggtggactgcttcttgtccgaattgtcaatggctgatttggcgaaagtggagaagctgatattcacggcacttttcttcttgacagcatccttcagcagtgagagtgtggcaggtattccgcgcttccaataccccaattctatgccttgcagatacaggatgtattcatagagcattgcgttgagttcgttagattggtggtggttaatgacttgtgcccccctcacggctccagcactccggtttgaggtaaacattggtcttcaggtagattttcctttggttcaaataggcttcaacctgtacaagagccgtgccctgcctgttaagtgtgttctggcggttatatacaagacggtatctgattttatccatttttccgcaaaggtgcgaaaagattaatggaagaaaggtatcaatgtggaacatttccacatcatcccacactatatgaggattttttccatttcacatataattagtaaaatattaaccaactgataatcagattagttattcttttggcataaaaattgtcctatcattatcgtaaaacaataaccattaaaaatataagattatgaaaaaatcttttgttgcagtagcattggtaatgggattaggaacaacagtggcatttgccgaaaatttgacctcaggtgttgaaacagtcatggcagtaaatgacttcacccctattgaagtgaaagaccttccggcagcggtaacggaagcaatcgccaaaaattttgcggaatcaaccgtcaaggaagcggcggtggaagcggcagaggatggcagtaagacctatcaggttgttctgacagacaaggaaggaactgaaagtacggtgttcttcaatgaaaaaggtgaaatactgaaataacatattttacgtctctttgaataaagaatagcctctacctttacaagcagaggctattcttataacaaaaagatacataaaaagacgggattcaccaatcctgcctttttcaatacaaactgctttacttatcaagatgccttacaacatcccagtttaatgaatctaaaaataaaaacacattcagttatttgtgatagcaaagctataacaaatattttaaagaaaaatcttatgcataaaaaatgcacagaataaactatatatagaccaacatacaacacatttaaaacaatattgtaatacagggtcattgacacaaacattctgaaagaacaaaagaaagacgcatgactgatagccaatccgaaagagtatgttattgaggttgtcaaaaaaaactaaaagaaatttagttaaagtcctattactgaaaacaacgtaacagattattccttaaatttgcttatatataaactttaaatataatgacatatgaaaacgattgcaattctaattactttacttttaataattaatataaacatttatcaaggtaattcaactgaagttttagcaagtaacgaaagcggtatctttcaatattaggatctagagaagaaaaaatgtcttagcaatggacataaaagtatatcgtttcattaactctcatgcaatgactcagattatttttttatcaaaaaccttttgtaatgattttataaaatacatttttaataatattaattctaaccatgaaaagtatttccattttacgcctaaccgcaatccttttgtgcagcatgcacctattgggatccgcctcacttcaagcccaaatgaacaaatgggtaaactatagcccggatttgaccaccgtactgaaaaatcctgccatgggatggatgatgtacgaagaaggctggtcttttcagggaacacgccacaataaaagcaacatctatactcccgaagttttttggaaacagatggaagaatgcaaagcagctgattattccaatattctgtacatcagaatgctgtggaaagatttggaacccgaggagggcaaatatgcatggatttacaatgaacggtataaatggtatatacaaaaagccaaagacaaagggcttaaactggccttcagggtgttctttcatggtgtagacggagtaccgtcctatgtgtacgaagccggagccacagaaagtccaatagacgatgaaggcaaaacccagccttattatgataatccagtattccttgaaaagctggacaagttcatagaggcttttgcaaaggaatatgacaatccggatgaggtagattatattgatgcatatggattgggaagatggggagaaggacatggactggtactcgaaaagcaagataatctggaaagcgttatccgacagataaccgaatcgtatgcaagacacttcaaaaaagtgcttacggtaatgaatctttcgcagagcgactacaggttttccaagccgctagtatatgacaagctggggtttcttcctcgcagggatggtataggcagtttttggttttctaatgaagaacgtgcgatggtacatgacgaacttttccccaaaagagctcttattggtgagggatgctggtggtttaatgcacaagatggggataactcaaaatacaagcatttccaaggagacaaacgttttgccatgaacgatttcaaagaagcttttaccgtttctgtgactgatgctttggacagccattgtaacacgctggatttgcgtgtacctttacagtgtaaattctggatagaagagctgccggaccaagttcagcgttttataactttaggcggttatcgtctttatccggactatataaaggtggagcaagaccacaaaacgttgactttgtttcattcatggaaaaactatggtgtgggtgtattgcctaataatcatcccaattggaattataaatatcaggttagttttgttttgatgaatgaaaaaaaggaaattgtatttctttatacagaaccggaagcagaaccttccgaatggttgaagggaatatcatacaattatttgagtcggtttaatattccggcagaattgcagggaaagtataccttatgtgtcggcttgactgacaagacaaaaaataacgaagcggctattgatctggctgtgtctgggaatttaaaaatagggaaatggatatttgtggttgaactggagttgtaatgtgtgtacttggcatttttgcaccaattaataaagaagcttctgactgattatcaaaaaataagaactttctctatatctgcacccagtaaatccaatatgtttagggatattctttcaatagtacaaaataacacaatctattcaagctaaattattgataatcagatagtttttgtatctttggatatccctcaaaaaagaaaattaagaatataaattagtggaaaataaaagtgcaattctgattattgatggattgcactttttattacttttgtaaagacattgtttcttcacatataatttgagattatgaaaataacgttttcatatttctcctgtcttttcattatcggatgtacacatcaatccaaccaaggaaaatcgttatagaaagcagcaatgcagatgcaattcgtgtaagtgctgatactttagcgtatgaatatactgcatgggcatttataaacaaatctgttcccatatttctcattagccatatactgctcaatcaatttacataatgatgttcaaaccacctgtattcatcttcctcaaatagtgctaaaaaagagaattctgatagccaactacctaactatcagaattctctttggagcggcaaacgggattcgaacccgcgaccctcagcttgggaagctgatgctcttctgcggctgccaaaggcttcgccttcgtcagctaccaactgagctactgccgtttagctgctcttaatgagaatccttgttatcggtttctttatgctggtttaactcttggtttaactttgccgttacatgagaaatgttcaacaatatattattatcacgttgtaggtaaaacctatgttacaaagataactctttggtttgattagggcaatagtttctatataaaaagaaacagcataagagtttcctcaaatgctgttttaatctgccctaattggtatggattattatttccgtttaaaaattattatatcactatgtccattattattaagaatcagttcatcttctgtaattttaacaattgtgtaaatgatattctcttctttccaatccccttgtccccaatcattcgtataataagtaacaaacatatatctgttagggaagtattcaaatgtaccattttcagtttcattactataaggtgtgtcataactatatgtataatcttcattgaatttaaaaagtcgtccagcaacttcccctgttccctcccaagtaccgatcaataattctaaggtattgtccggttcttgaacttcttggatgatttcattagtaacatcatccccacaagaactgaatcctgtacatagtgcaactaataatgaagttgccaataatctaaatcttctcattatcaagtttaatctacgcctacctgttccctatggataagctgttaataaatcaagcattgaggaacatataatctagtttgattaccaatgctataacgggtgcaaatataataatattattataaataaaagaaatataaaaggaataaaactatataaaggttttatatttagtcacttggataagtaataaaatatttcaccttataaatataacagctcaaatccacatgaacttataaagcacaagtaaatttctccggctaaaattaaaggtaggacaaactcggattggggtatataagactaaccttgctctaaatttgtccgcctttcaaagtgacctcacgacatcaagcctgctctgacaagcaatctcttgacttgtgtaatctgaaacttgcatcccttagatgtaacgaagccttgttcatttaacagacaagtcatttcagataatgatttgccttgcatagataatgaccgtaacagtgctatcgctctcatgttattcggattgttatcagctttagccttgttggtagtgatactatgttggactgcttgttcaagtttattcatcaagttctccgatttaccaagctgcacaccccttgcttttttggcttgaagtgattgtttggttctctgaccaatcagccctgcttcatattcggctatgctactgatgatatgcagaatcagtctgttggcttgtggaaagtcacagaacacaatctcaacatcactttctaacagcttggaagtaaatgctacattccttgacaacctatccaatttggcaacaatcagaatagagttcgttttcctgcacatcgccaaagctgcaagaagttgaggtctgttagacttcttcccactctccgtttcaatgtattcagcaagtatgggcttattctttacatggttgtgtataatctcccgttgtgcttctacaccaagacccgatatttgctgtttcatggtggattgccttagatatgctatatatgtcttcataattcacaattattaatagttggttacaagtgctgaatgttcgttcagcttatgtaagtaaggacacccaacttagaaattgagtgccttttaccttattataattctccctcgtcagcaaagctgtaatatcctgtatctgtaagtatgaggtggtctaaaactgtaattctcataagtcttgcagcttctttgacctgcttagtaatctccatatcctgcctacttggtttcagattaccacttggatgattatgcgcaaggataatggctactgaattggtgagcaatgcggcttgtagaatcactcttatatcagcacaagtttcagtaattccaccctctgaaatgagcgtgtaacctaagacttgcttggcttggtttaagaacaagactttgaaatattctttgtaacagattgtacctttcttatatgttgaaagtaagacttcataagcatcctccgaactatatattttattccggctttttgatgtggatttgtaagtgagttccacttctccaacagtataatccatgtctaatattttactattcattctatcaatattaatgtggtggtggaagaaaaattggacagttaaaatggtctgtcgccatattcataaacaagaattgaattgcataccctatcatagaatgagaatccgcaacaagtatggaagtagctttcataaactgctgcatattcaccatgcagcctgctgttcctatccaaaaatgaatcaaacttgtgcagccaatatttaagtgcttgcaagcgtttgatatattgcagattattctcacagtaacataatttctcttgtaaagaagtgatatgattgatagcattttcaattttagatttatccataatgtatgatatttaataggttggtagaaataaagaaaggacaactaacctaatagctgccctttcctctctcaatcaataaagcccatttaatcaatgaaccatttgtaacgctcatccccatgtaaagccgcattgattccaactgccatttcagtggcatttaaagaacggtctaagaacgaatcaatatagcttgacttattagcccctgtaagcaagttatagaacttccacatattaagctcacttccaaagctgccaaagttttcatcgttgatgtatgctttggctacgctgttaatctgcgtatcagtgagcaacattcttggcaatgccttttgatagcctgttggcaagcattggtaaagtcgcatcttacctataatctgtgcgaattggtgttcactcatggaagtgttgcctaattgctgcatcagataaagatgcttggcaggattgtagttattgaacagttccaatgctgcacgatagagttctgttgtgttgctcactcttaaatcatccttgtaaccattggtaaagatgcacatattgcaacagacttggttcttgaagccaatagccaatctgaacagctctggaactttcttgctgtacaggttcatctgattataagccctcacacctacaattgaaagattgagcttatttcccccaaccgtttcataaatggtaggaacatcaatgctgaatgctgccctctcataataaatggtcttgtcagattccaacagttggttggctggcttgtggatagcttcagggattctgcctttgataatgtggcttactcttatatctgcctgttccactttttcaccattaaagaatgattgggctgcatcctgtatggtttcaacaaatgcagcatggttaatggtaagttcattgtctttggagaacacaggagtaatgcactcatgtttcagatgattcaatgttacttcctgtgtattggcttcaatgaaatggtttacaggtcttacaggttcgtccacaataattgtagcttcttctgcatattcacccaaattcattctctcacggttctgtgccatagctggcatgataactaaatttctcataatgaaattgaattaaatggttattgattgaattaactccggaattggtaaagtccatatcgtcttggattactccataacgatttgaactttactacaattcgctgaattacttttaagtgatattacaattagactatattaccattatgtctgtattgtgtatctctttaagaagtccatgaatgatgtgaggtgaatagtaaaatttataatggttgagggggtgggtaggtgtctgaccaattccgtttttattctgcttggtgagagggggtgtaaaatagtggtatggtagtgcttgtatagttaggtagttcttccaaggagagccttaaaaccaataattggagtttatagccaccttaacatgattattcaacattatccaattttcattattttatgatgtcgagattgattacttttgttgtatcaataaagagggataagggagtttaaaagttacagttattgtcctaaaatctatatataagtgtgcacagattcagaaataagaccggagaatgctctggttttattttattcaaattgtccaattttaattccatgtcctcctttatattaagattaatatccatgaaatattggacacaacttcaagatgtttttttattaatcagctcactaatatgtagaatttatgataagaactgatattgaaattcctaagaacattaagtatttaggtgagattaggaatattgaattaccttatggaacatttgacagatttgaacttccgaatggaatattaaacaaagatgtacctaattgtggagcaacgaccttggctcttgaagataaccataagaccattatatgtagtccaaggaataatctgttacagaacaaaagtgaacagtaccccaatgttttgttggtaattggtggagtgaatataaatgaggtaaggacttatattgaacaaacagaaatccccaagattttggtgtcctatgattccatttacaagctggcagagtgtataaaagatactacggattggagaattgtagtagatgagttccaatatatgttagccgacagcggttttaagtcagaagtggaattgaaattgttggagcatctaaagaggtttccgtatgtcacttacttgtcagcaactccaatattggataagtatttgaagcagatagactattttaaagatatgaactattatcatttgatttggacaaataaagaagttgtaaaagtgtatagggagcgttcaaataaccccataagtgctgcgatagaaatagtacggtcatatcaaaataaaaactatccttctgtattcatggatggagaaacttattactccaaagagtgtgttatatttcttaacagtgtaagcaacattgtgaatatagtcaaacagacggagttattacctgatgaggtaaatataatagtaggtagttcagaggaaaatgataagtcgatagccaaacttggtaatggttttcaacgcggaagaattcctctaaaaggtgagacacataaaatgatcaccttttgcacttcgacagcatttgccgggtgtgatttctattcaaccaatgcttcaacctttgttatcagtgattgcaagcgtatcaatactgcgattgatatttcaactgaccttgtacagattgcaggtcggcagcggttggcttgtaatccgttcagaaagttcctcacattcatttataatgtgaataaggaggatgtatcggaagatgaatttaggaaatatctggatgataaggtttatttgactgagagagaagttgattctaacaatgatgaaacggacatccaattaagaactaagcgtattagagattgcttacgggaacaaaagatgcttcaatatcaagattcgtacactatgtatgataagtcttctgacagattcgtttttaataaattggcatatataagtgagcaatatgcctatgaattgcagaagtacaattataggaatggtattatcgttaagaaacaattgtctgagaatgattttgatgtgacggagaaccaaacttatggtatttataaagaacaattgaagcatatagttaagaaagaaacgtttgttgatagaatgactcagtattgtgagtataaatctaaaggtctgtgctttgatttggctgcatttactttggagcaaaaatatcccgagttgaagtattattatgatgaactgggtggtaataggataaaagctcttggctataaggaaaaagaattgaagaatgaaattagtatcagacattcggatgctaagattcgttataaaatgggtactgtcttccaaatgggtatggagcttacaactgacaggataaaggagttgatgaatgaagtctatcaaaaggtcggggtaaagaagaagggtaaagccacagatttagagaaattatatggctttaagattcatccatgtaaaatactgcttgatgatggtagcaggaaaaatggatataaaattataggggtataaataaaaaaagggtgtttcgattagttcgattcacccttcatttattttatgtacaaccttatttgacttaattaattattgttggaatttttgtgcagtatatgaacctgctcaatgataattccttgaaggcattgaactttatcctcacatttagaagcatccaatttaagtttctcgtcagcttcaatactgttaagagcttcacagattccatcaaaaccgtattgtgagatgcaataattaatggctttgatgtatctggtctgtttggctgcctttgctccaaatgcttggacggcggctttcattaaaatttcagcttggctgtatgtccggtgctctccttttggcagcagagcacttgctaaaattgccttgctttgcatcaaggaggttgtggtatccaaaccaaaataaccttgagcggctgtgccgttcattccaaagctattgctgaactttttaatctgtaacagaagtttatctttggaaacgattccggcaaatcctatccaatcatcctttgacgggcattgggatagatatgctgtcgttgccactcgttgataggcatcagctacgctgtcacactccactatttctgctttgattggaatatctaaactccatagattgatgttatccggcttgtcaagatagactaatattcgtggtgctccttcagggagttcatcaatctctcgaccatgatagtcgaatagtttaacattttccttaatgaacacttccgcatctgttaaacagaaaatggtaggtaaaattttagatttatccattgctgtaaagactttatctttgctaaagtctttctgtttaatagaataatcggtgaatgcaggaataatatcttgttcttcacccttgattgaaactgtggctactgcgagccacttaggggctgtttccgtcccataatttattatttgcattatctaataatattaaaatgaaataaatagccatcctttgagaggatgaccgttattgctcactttgatttaaaagatatgctgttcgtcttcttatagtaacctacgccttccgtaggtggaataagattgtacatgatttcaaagacctatagtctttatcagaagaccagtcggctggtatcaagaacctttcgacaatgcaaagataaggcatattatcagaagtgtccaaacctttcggtggtaattttatgtatcatctgaaaactgtgcggattagttaaattatgagtatatcccttaacgtcagcaaatgaataatccccacctgtattgctacaagtgaggaatttgtggtttagagtaaattcttcattgcttcatctacttgctcgttatcgaagctatccaaatatatttgagtagttgccaaatctgaatgtcccaatgcttcactaatcaatgcaatgtttacgccggattttttaagaacacttgcaaaagaatgccgggctgtataggtcgtgacattggattcaactccaagttgtgcggcaagctgctttaaattcttgttgacctttcctagcatcttatgtattctgttctgcttttgcagtggtgtcttatgcagttgggcattgagaatggggaataggtagcctttactctctgctgcatatcgtccaatgatttgcaaggcttcttctgacagtcccaacttgatgagcttgcctgtcttttggcggatgtagtgcagccgtttcccctctatgatattctctttagttagattggctatgtcagtgaaattgatgccgccacacagataactgaatatgaatatgtccttactgagttgaacatattgccgtttaccaatgggacggacatccgttgagaatttcagtacgtcagctttagcaatagcacgcttctctgtacttacatcaaacttgcttatcctgtaatcattgaaaggatagtcagacttacgtgcacatttactttcaatggctttattgtacgcgctacgcagggtgcggaacaacaaactcatggtggtttccttgtttcccttggaacgcaaccacttctcgtacttgttgagccatgcaacatctattgcactaaatggaatctctaaattcccattggtaaagacattgatagagttgtaggagcttttataaataagcctgttcccatatttctcattagccatatactgctcaatcaattcttgatagaactgtttaacggttttaagttcatactttttgtgatcatcttggagcagagtggtagtggtgtactctttctgttcagtgttcaattccaacattcgttgttgcagttctgcttgtttgtcaaggataagttttaagatgtattccttgttgggacaggttggtttaggtctctctcttacgaaatcccactgattagccttaatggaaactcctaaactttggtacttcttcttcccatctttacagatgcgtaacattaatgggtgctcgccatttgatagaattttagacttgtagcacaccactgtaattgtagcattcatgctgttcttggtttaactctcagtttaactcacacggttaaaccacgctaaaaccagcactttctaaaaacaaaaatcagataggaatcttttgataactatctgatttccagcagagcggcaaacgggattcgaacccgcgaccctcagcttgggaagctgatgctctaccaactgagctactgccgcatctctaaaacggaaacaaaagtaatatatatttttcaaccgaccaaatataagcaaacaatatttactataaccatcaaaatttctgctctcctgtttatatcgacagctttatgcatatcctgtgtatggataaaccgatccttatctccaataaaaggtttatagactatctctccaaaataaacatgaggacctccaaaacggcaattcaagatacctgctaaagcagactccggataacctgaattaggactcgcatgccggttaccatatttacctacaaatctcagcaaaccgggacgccctgcacacagcaccattaaaaatgcagttagacgagccggaatatagttcgccatatcatcaatatgtgcagcgacacaaccaaactgaagataacgttcattcctatagcctatcatagagtcaagcgtattaaccatcttataagcaagcataccgggaactcccaaaagcaaataccagaataatggggcaataaccccgtcactcaaattctcagccaatgtttccaaagcagccgtacgcacttcctgatctgtcaattccgaagtatcacgccctacaatacgggaaacctgctttcttccttcctccaaagaatgatccgcagccaaaaaaacctgccttacttcgttgataagtgtagttcctgccaaacaatagaaaacaagcacagcagagaggataatacccaaccaacggtttagcacaaacagataatgcaataccaaaacagatcctacatacactagcaaaataagcataatggccgccacccctcctttcaacatccgatgtgtcccacagttccatcgtttctcacaaaaagagatcagcttcccgaatcctaccaccggatgcggcaatcctaccggatccccaagcaatttatctaatatccatcctatcaacaacggaagaattaatacatatatgtccatttctttatactttctaccagtttgtcattttcttccggagtttgtgtagcaatacggaaaaagtgttcattcagcccttcaaaattggatgcgtcacgaataaggatcccatgctctgttgccagatattctttcaaagccgccgcctttcccatccgcaattggactaacatatagtgagtatccgatggccagatctccattccccctattgaaagtaaagattgaactaatctctttttttccctcaatagcaaatagatatctatatcatattgagaagaagacaataaataatgcccggcctctatagccaactgattaacagaccaaggcatccgctgtgtccggatttcatgtagcagttctttacatgcagtgatatatcctaaacgcaagccgggcacggcaaaacgttttgtcatggaatgcaacagaataacattcggaaattccgcagcctccctggctgtaagcaaagccttctgtgtaaagaattcatacgactggtccatgataaaaatacgctgcggattttgttttatacaggctgtcaagacttccttctccctaacctctcctgtgggattattaggattacataaccatatcaacctccccctatccggcaaacggttcaaattatatataggaaccactttatgaccatgcagacgacaagcgtccgcatattcgctgaaagtgggcatcaagatagccgaaatctgattcctgaatgtctgagctattaaataaatggcttccgtagccccattggtcacacaaacctcttcagacgaaagatgaaaccgttccgctaaaaccttttccaacgaataaggttccggctcggggtacgtacggatactttccatctgctgaaacaaatgttgatgtaatccgctatggtctacatgattatatacgtttgaactgaaatttatctttattgctttatacttataagcatcatcaccatgtccttcaatcatttccactcattatttggtacaacaaaggcagattaagatgactgcgtacatgctctgccaatttatcatattgttcttctttataagtccggtaatccaacaccgtatgacactccagtttttctgcgtatggttccagcaaataatctataaatgcctgattatccaatattccatgaatataacttcccatacatttttgatttacaaaacaaccgtcctctccaccgtcttccagtttattcaaaggaacaacagacacccccggaaccgggcgggtttctcccatgtgtatttcatatccttggcaagtttccgcattctcaagaaaatgaaaattcacctgccgcgtcaccttctccccttgcatcgtagtaatgacgggaagcagtcccagtcccggcaattggcggatctctccctccactccttccggatcgtgaatctcaagtcccatcaattggtatcccccacaaattcccattacagtaaccccttccctatgcgcacgtaggacagcttgcgccaccccgttccgtctcaactcatacaagtcatccaaagtgcttttgctgccaggaagcagaataatatcagctttggccagatcttccgtattattggtataataaaggtgcacccgttcatcccgttccaatctgttgaaatctgtaaagtttgagagatgacgcaacagaacaactgctatgtttattttaccttccacggcgtgcatccgtttatagtccaagcctacggaatcttcttcctcaatatgtatatttctataataaggtattattcccaagacaggaataccacataaatcctccatcatcttcacaccaggctcaaacaaacggatatcccctctgaatttattaatgattactccttttatacgtttcttgtcctcaggagtttgtaacatgaccgaaccatagacactggcaaatactcctccccggtcaatatcagctaccaaaatcacatccgcatccgcataacaggccatcggcatattcaccaaatcagtatcccgcagatttatttcggaaatactccctgctccctccattacaatagggttataacgtgcggcaagacggtcaaaggctgcgtttacctcctgcctcagctcttcacgtccctccttgcgaaaatactcaaaagcgttacgattaccgatgggacgaccgtttaataccacttgcgaagtatgatcggaactgggtttcaacaacaaaggattcatgtccgtatgacaaggaactccagccgcttcggcttgtacagcttgtgcacgccctatttccaacccttccggagtggcatatgaattcagtgccatattctgtgccttaaaaggtgccggtcgataaccgtcctgtttaaaaatgcggcataatgcagcagcgatgacacttttgccaacatcactgcctgttcctgccaacataatcgggtgtaaattctttttcatcactctttcttctttcttttatatgcaaaggactgccacttttcttccgtccagttctgttgttgcatctcataacgggccataacaaaaaacaaatcggacagccggttgataaaccgaagaattatctccggtaacggatcttgtttatgcaaagtccataatctccgttcagcccggcgtgccaccgtcctagcaaactgcagctgcgctgataccggcgttcctccgggaaggataaaggaactattatcctccatctgttccatcaatgtatccattgcttcctcacaaaaagagcataaatcatcaggcaagatattaggattcccttcacggatagttgatggtgtagccacatggctcatcactgccatcatgtttttctgaattgaaaaaagcaaggattgccattcgtgcccctgaggtaaaaacgaacgcacaattcctataacagcattcaattcatcaatacatccattagcttcaatgcggatatcatctttaaaaacccgctctccaccatgaattcctgtcatgcccttatctccggttcgtgtataaatacgtttcatactttccataatttcaagatatccgtttccccccaatatagatgagtatatccggctatcacgtttttatatctataaagcggggtactcacttccattcctcttgccgtaaattgttttgctacagaaggcatagcgtcaggagcaacgacattggaataatgaaattcgtgcccgcgaagctccatccctttatattctatacggcgatatcctagatgaagtctggcacccaccatggtacaatccaaaggcaaaatccccgtcatggcatatgcagtccctccctggcgggctgtcagggaacgggtgagaaacatcatacctccacactcggccaaaattttccccccctcctctgcataagttcttaatgcttccattaactttttgcgccgatgtagttgacgggcgaacaattccggatatcctccgggtaaataaaccaaatcagcatccggcaaatcactaccatatacaggactgaaataagtaatgcttcctagcgcagacaagcggtctatgttttctctatagataaagttgaaagccggatcccgcgctatggctatcttcatctttttagcagaaggagtaaaactttccacccctgtttctgaactataaggcaatgtataccgacacgggaaattacgatgacaaatactcagcagcttatccaaatccacatattttccaaccaattccgcagcctgttctatcaaggtgttcatggaacgtttggctgtcaatgtcaaacccaagtgccgggatggaattttcaacccttctgtcataggcagatatcccaaacattccactcctgcatcaacacaagcctcacgtaaataagcgaaatgagaaggagatgacacttgattgaaaacaatacctgcaatcttcacagccggattaaaatgcttgaaaccataaattaacggagccacagaataagctgtagaacgcgcacttactataagcactacagggatattcaacaatctggctatttcagcactacttccctgcattctttgataaccgtcaaacaatcccatcactccttcggttacacatacatcggctccatctccatatttattatacagatgttgtacatgggtatttgatgccatccaagtatccaaattcaccgactcatggtcagcagccagcgtatgaaattgtgtatcaatataatcaggaccacatttaaaaggctgtacccgcagacctcgtttgtgcaatgcccgcagcagccccatcgtaaaagtcgtttttccgcttcccgatgtagcggcccctatgagtaattgtggcttcattctttagtatttctttaaaaacggatacaaagatagtgcaaattgcaaattatcgaaattagaataacagattaattcataattccgacatatcaagtaaatatccttagaaagcaattaaagttttatggtttatcaattaaataagctacctttgcagtcatttttgccagaatgacagctatacaacaatgataaaattgatactataaataattaaactagataatgaattatggaactttttagaaatctctttgaagggtaccctaatttatggggcggcggagtagcacattccgtacttattctttcactggtcattgctttcggcatcatgttaggaaaaataaaagtggcaggtatctcattgggagtaacctggatactttttgtaggaattgtattcgggcatttcaacctgaacctggacgaacatctgttgcatttcctaaaggagttcggtctgatattatttgtctactcagtcggactacaagtgggtcccggtttcttctcagcattcaagaaaggaggattcacactgaacctgcttgccatgatggttgtatttttaggtgtgaccatcaccattatactccatttcataacaggtgtccccattaccacaatggtaggaattctttcgggagctgtaaccaataccccgggactaggtgccgcacagcaagcaaacagtgatctgaatggtatagacgctcccgaaatagcactgggatatgccgtagcctatccattgggagtagtagggtgtattctctccctgctggcattgaaatatatcctgcgcatcaatacaaaaaccgaagaagccgatgcggaacggggattggggcatctacaagaactgacagtacgccctatctcactagaaatacgcaatgaagccgtagaaggtaaaacaataaaagaaatcaagccattggtaaaccgtgattttgtgatttcacgcatacggcattgtgacggagacagacaaacagaactggtgaactccactacagtatttcacatacacgatgagattcttgttatcgccaatccgatagatgtagaagctatcactgtcttttttggaaaacaagtgaatgtggaatgggatttccaaaacaaacaacttatctccagaaaaattctgatcaccaagcctgaattgaacggtaagacattggcccaactaaaaatcaggaataacttcggagcaagcattacccgtgtaaaccgttcgggtgtagaccttgtggccactcccaacctgcaattgcaaatgggtgaccgggtgaagattgtgggtagcgaactagctgtagcccatgccgaaaagattctaggtaattccatgaaacgtttgaatcatcccaacctgatccctattttcttaggcatcgcattagggtgtattctaggaagcactccttttttattccccggtatcccccaaccggtaaaactgggactggcaggaggcccccttatcgtatccatcctgataagccgtttcggaccacattataaactgataacctataccaccataagtgccaatttgatggtacgtgaaatcggtatctcgcttttccttgcttgcgtaggattaggagccggcaaaggattcatcgaaacaatcattaacgagggtggatatgtatggatagcatacggcgccattattacgctgctgcctttactgattgtaggtataataggacgatatgtttataaactgaactattacaccttgatcggagtattgtccggagccaccaccaatccgcccgcattagcctactccaatgatttgacctcttgtgacgctccggcagtgggttatgccaccgtttatccgcttaccatgtttttacgtgtactcacagcacaaatattaatattggcacttgcctaatcccgccagaattattgcaaattcatattaccgtaggagtgaattagattcactcctacggttcaaaatcccccacatctttcaaaagcaaccattttttcattaatcttaaaacatatataaaataattgcctacctttgtgcccgatttggtgatataggcagcctttctctgcctgtataaaagggaattcggttatagaatccgaagcagtgcccgctactgtgaaacccgtctgatgaaaagcaattctcaccaagccactgtttcttttgccagaaatgggaaggcgcttttcagggtgaagccaggaaacctgccaagtccgaacatagataatcatgctctcccggggtcaggaaagtgaattattaattcttaaattctttcgatgaaagtaaagttattattgacagcaattactttaagctgtctggctattgacgtactggcacaagtcagtatcagtggaaagattgtgagtgccgataccaacgaacctatagtgggagctaatatccgtatcgatcaaagcctttcaggatgcaccacaaatggtaaaggcgagttttccatcagcaatctccctgatgggaaacacgtattaagaatcacgcatgtcagttacacacccaagtctatcacgacaaaaggaggtgaaaagaatcttcttatcaagctacaagacagttttaccaatataggccaggtagtagtaaccggtacaggaacacaccaccgcatgacggacagtcccgtgcctgtttccgttatcactgcaaaggatttaagtaatgccagtgtaacatcgctggacgaggccttacaaaagctgaccccgtctttctcaagtatgaccaacggcatggggacaacattgagtctgaatggattgcctgatgattatttcatttttctggaaaatggcaaacgcctgtatggagatgacacctatgctcgaatcaatgttgccaaaatcaaacgtattgaaatattgaacggcgcttcttccgctctttacggaacaaatgctatcggaggagttatcaacatcattactgatgatgcaaaaaatgctatcaatgtttccagcgatacccgttatgccagtaaaggacgttttacccagtccgtaaacatagatgtcaataccggcaagttcggctcctacacctcttatcgccgtcagcaggccgaaggatggcaactgaatccatacgaggagaactccaaaactcatgaattggaagaaaccgggaaagtagcttctacaggcttctatgcaaatactgtcaatcaaaaattcactttcgatgctaccgacaaactctctttttatgcccgcggcggatattatgacaacaagacacgccgcccttatgaagcatacgactacaacatattgcatgaaacctttaattatggcattggtgcccaatacatgataaataaagggaattatattaccgcagactgttacgccgatcatttttcttcctcttattgtttttttaaagacaataaaacctataatggaaaagcaggtgaagagcaagtgcgcaaacggacccgtaatcacaatcttagcataaaaggtatttttaaattaggtaaccggcacaaactttcagtcggcacagaatatatcgttgatgtcttgaaaagtcaaacagacaatatagccaaagaagatgcttatacactggccttgtttgcacaagatgaaataaagttactgagaaacctacaggctttgatcggtgtacgttacatttatcatgaaaatttcaaaaatcatgccactcccaatgtagcactgatgtataaacccggcaaattcaatttccgtgcctcctatgcagcaggtttccgaactcctaccctgtctgaactctatgccactgacatagctaaaaaaaatgacaggttgacaataggtaatttggatttaaagccggaaaagaataattatttctcattgagtgcagagtatgtacatgagcgtttttcagtatcagtcaatgctttttataataatattcgtgacatgatagattataatacgattgccacgggagataaagctatggagcaatatggtcataaggaagttcgtcaacgtgataatatagcggaggctaaagtccacggaatcaatgtatccgccaatgcatacctaggtgccgggttcaatttaagcggaggatacactcatcttaatacccaagatgtggaattggaacaacccatcgacaaaagtataaaaaacgcatacaatatcaatgcccaatgggcgcattcatggaaaatatatcggttgaatataaatttgaacggccgtatcaacagcaagcgtttctctaaaagttacggttatgctcccgagtatcaattgtgggatttaaacacacgccattctttcaacttaaaatctgtaatcatcgaacccggattcggcatggaaaacctgttcgattatatggatgaccgtccttataacagcaattatgcgacacttacccctggacgttcattctacatcagtctgtctttaaaatttaaaagctaaaaaaaatcaaagacttatcgaagataatataaaataaacctctatctttgcaacggaattagtaatcgggctatcacatagcccgatgcaagggaacccggtgtaaatccggggctgtacctgcagctgtaaatcctcatgatgttgattggatagtctaaaaccactgtttcatttgaagaaatgggaaggtttccaatcagaggaaagccagaatacctgctaagtctgttgaacaataaacaccaagcttccaggattagaagtatgtgtccattcgaacaagcgttttccaacgtctattcctttgtggcattcctctttatcagagggaaacttgatgttttattttgcaaattaaataaaacataatatgaggtatttacttcctgctattctactattaggtacacaaattgcaagtgcccaaagtattctcaaagataaagacgataaagaattgtccgtattactgaatgaagtggtcatcacgggtacaggtactgaacattatctgaaagatgctcccgtacagactgaagtcataaccagcaaagctttggaacaatatcaggcacgcagtatagacgatttgctcagtggtcttagtccttcattgacctttcatgatggtgatatggggagccatatccaactaaacggattgaacaatgactatatcctgatcatgataaatggaaaaagaatgaatggcgatgtaggagggcaaaacgacttgaatcaattaaatcctgctaatatagaacgcatagagattgtaaaaggggccgcttcttcactttatggcagtgacgcaatagccggagttatcaatatcataaccaaacgtaaccgtgaaaaaatggagctcaccaacacatcccgcataggtgaatatggtgatatacgtcaaagtaccagtttcggctttaactatagaaagataaaatctgtaaccggaatcaacttccggcataccgatggttggcggaatacagacctacaatgggatcagaatcaattgaaatccggctctactatgttgaccgtaaaccgttcttcaaactataccctgtccgagaacattgaatggcaagtcaaccgtaaactagacctcactgcagaaggcacttattatgagcgttgggtaatgcgtacacacggtccttggaaatatcaagccaatgatttttattatcgcaactatacatttgcagtgggaagtaaatataaattaggaaaacggaattatctggcagcagacctatcttatggcagatacggttacttctatgactataagctaaacgagcatactgattattttctagacaatgaccgccatgaacgtatcacctactttgccggtcaacgtatcaaacaaagtattcagaaacaaatattaggccaggtaaaaagtgtattttatcttggagaggatcatattttaaatgcaggaatcgaatatcagtacaatcatttggaatcacctcatcacattgacggtgaccgcgcttccgtttatacgttggcagcttatatacaggatgaatggacagccagagaaaatctggttctgactgccggggtacgaggaacacaacacaaggaaacagggttgaatttcagtccgaaaatatcaggactttataaacccggagaacatattaatttgcgtgcgtcttatgctttaggctacaaagcacccactattaaagaactttattataattataccggagttatcggaggcggtgctttgactgcatatcatggcaacacagatctaaaagcacaaacctcacaatatgcttcaatcggtattgagtacgtagggcaaaaattccaagccagtttaaccggatacatgaattatcttcacaacatgattgagttggttgaaatttccgtaactcccgatgaaaagtttcttgaagtagaaaagagcaaacaatataagaatttgacaaaggcacgtatttatggtatggatttcaccttcaactatcatcctgcaaaatctctcagccttgccggtggatatagttatgctgatccgaaagcacaatatcctaacaaaggtataaattatatgaaatatcttcctattgatgccacttccagccataatgcaaatttaaatgtcttatggcaacattcatggaaactatatcgtttgggtgtcggcatctatggcagatatcagtctacacgacgttatatcaatgataacaatgccgacggattccaaacttggcgtatcaacacagcccactcattattaaaaatgaaacggtggtcattaacgatgaatgccgggatagataatgtatttgactatgtagaccgtactcccttcggacggaatcgtgctacatcaactccaggaagaactttttatgtatctgcccttattaaattcaaaaacaattaataaccaacaatttataaatcattttttattcgtatgaaacaattcaagtattatctgatggcggcttttgttgctgccgtaacttgcacaggattcaattcctgtagcgacaatgatgatgaagaaagtactgttaatcctgctgtggatgtagtgagcaaaaccaaacaacatgacactgccatcttactctgtactttcggcagcacctataatgagtccctaactgtttatgatgacattattgaggatttcaaatctaaattccccaatacggatatttatatgtcattcacttcacgtacatgtatcgggcgcgtagaagcatctaccggcatagcacgttatgaattggaccaatggttgaaagcaataggcgatgcaggatacaaacgtgtggctgtacaatcattgcacgtaattccaggcgaagaatatctttcattgatgaatactgatgtaaaaaaatactttatgattcaatggtatccgcatattgatgtattgaaaggtgccaaccttctttccagtgcagaagatactaaagatgtagcagagatactttacaaacactatgagtctaaattagcaggcaagaacaacatcgtgcttctaatgggacacggtaatccggatgagaattacaatgccaacacaaagtattctgacatggaaaaagcattgcaggaacttgctgccaacaacaatatctttgtaggtactgtggattatggtgacatgcttttcttcccgaaagaaatagagaaagagccggctaatagaattcctgtagaaggatttgacaaaacccaatatcccaactgtatgtactctaaggtgatgagctattgcgaaaagaacggtctgaacccatcagaagtaaatgtttatcttgcacctttcatgtcaattgccggtgaccatgcccacaacgatctttggggattggaagctatggccgaagatgacgatgtaagtagtgtggaaatcaatacaaatgaatatagctggcgtgaacgtttggagaaattaggattcaaagtagacagaacattcgaaagccacccgacagatcaagccggagccgatcatggtattaaagacggatgtaatatgaaacctttgggtagttatcctgagattcgccaaatttgggtaaaccatttatatgaaaactggaatgatgacagtgcatgggagaacggtgaagactatcaaccggaagcataaccaacttaatatatttatctgaaaaaggcggaatttatttccgcctttttcagatacgccaaaaccgatagataccatctttcatctcatccccgtatatccgatagaaatgctaatgggtatcaggagatatgtcaattggttactcatagcactgtacatggaaatagtagctgtgctgcttggaagcatggtaatagaacttgcccaagaggtttaatgctatccaaattttacaaatcatttctgatttttaaacgaactcaatgctgtaataattccaattttcattatctttgttcccgaatcggttccgaatagatgtcctctatccggattaaaagggaatcgggtgtaaatcccggacagtcccgctgctgtgaaactccgataaaatttccgatacgtacctattgccactgcctgactccacataacgagaacgcgggaaggcatcggaaatgaggagccagtcagaagacctgccattcatcaaaggccgtttctactcgtggggttagggaagcggtacgaaaatatacaataattcataccaacagcatctcatgcaaataattaaaaggaatgggacaacagaatcctacgacagggaaaaaatagccgttgccatacggaaaagttttatcagtacccaaaaagaaataacagatgaagctgtctacaccatagtagatgaagtggaacaatttctgcatcaaaacgaagcaaatcgtagtgtagaacgcattcaggacgaagtggaacgtagcttgatggaacatggcttttacgcagaagccaaaaactatatactttaccgttggcagcgcacagaaagaagaaaagtcctcagtcaaatcattaccggaaccggtgatgatactatagcaaatatactgaaagagatacaaaaagacttctccgggaaggaatatagtctaacctttctcgcagagaaattcacaagtttctgtaaaccggatatgacatccggggaacggttggcggcacttgtcaaagcggctgtagaactgacaacacaagaaactcccgactgggaattcattgcagcgcgtctgctgaatttccgattgacaaagaaactgaccgaacaggcggaagctgccggcatcttttcattttatgataaattacgctacctcaccgacgagggcttgtatggtaattatatcttggcctcctatactccacaggagatagaaacggcagccggcttcatgtgtcccgaacgtgacaagcttttcaattattcaggactggatctgcttgccaaacgttatctgatccgtacccgttcacacgaacctatagagtctgtgcaggaaatgtatttagggattgcccttcatctcgctatgcccgaaaaacagaacagactgcaatgggtaaaaaagttctatgatatattaagtcgtctggaagtcacaatggccactcctaccctggcaaatgcccgaaaaccttatcaccagttatccagttgcttcattgatacagtgcccgatagtctggaaggcatttaccgcagcttagacaattttgcgatggtaagcaaatttggaggaggaatgggaatgtactttggcaaagttcgtgccgcaggtggaaacatacgcggattcaaaggtgtggccggaggtgtaatccgatggatgaaactggtgaatgacactgctgtagccgttgaccagttaggtatgcgtcagggagccgtagccgtctatctggatgtatggcacaaagacttgcctgagtttctgcaactccggaccaataatggagatgaccggatgaaagcgcacgacatcttccccgccgtatgctatccggacttattctggcgtatggcgaaacgggatttaaaccagcaatggcatttattctgccccaatgaaataatgaccgtcaaaggatactgtctggaagactactacggagaggaatgggaacaaagatacatggattgcgtaaatgactcccgactctccaagcgcagcatgagcatcaaagatatcgtcagactgatactgcgttcggctgtagaaacaggtactccctttacattcaatcgtgacaccgtgaaccgtgccaatcccaatgcgcaccggggaatcatttattgctccaatctttgcacggaaatagcacaaaacatgtcctccattgaaacagtttctacagagatatgtacggaagatggtgatacagtggtagtcaaaacaatccggcccggagactttgtggtatgtaatcttgccagcctttcattaggacatttgcccttggaggatgaaaaacaaatgaaagaaaaggtggcaactgtagtacgggcattggataatgtgattgaactgaacttttatccgattcctttcgctcagattaccaatcatcgctaccgcagtatcggcttgggagtcagcggctatcatcatgctcttgctgttcgcggcattcgttgggaaagcgaggaacatctcagttttatggataaagttttcgaacgtatcaactatgctgccatagcagcaagtagcgaactggcaaaagaaaaaggggcctatcattattttgaaggcagcgactggcagaccggagcttattttataaaacggggttacaattcgccagaatggaaagcattggctgtaaaggtttccacacaaggaatgagaaacgcctatcttcttgccattgcccccaccagcagcaccagtatcattgccggaaccactgccggaacagatccggtaatgaaacgtttcttcttggaagaaaagaaaggagccatgctgccacgtgttgcaccggcattgtccgataagacctattggatatataaaagtgcttatctgacagatcagacatggagtatccgtgccgcagggatccggcagttacatatagaccaggcgcaaagtctgaatctatacattaccaatgaatttaccctgagacaagtattaaacctgtatttgctggcatgggaatgtggcgtaaaaacagtatattatgtccgcagcaaatcattggaagtagaagaatgtgaaagctgtgcttcctgatcttttcgtaaacactccagtactgaattgtcatgctaaaacatttcttgtaggggcaccatgcttgcgcccctacaagaaatgaataacaaatttatttttaatatacagccttgagttagcagtaaaacaagaagacagaatataaaacaacaataaatcatgaatacaataaaattaaaaaagaatgcccttttcaatcctgagggagataccgacctccgtcacagaagaatgattggaggaaacaccaccaatttgaatgatttcaataatatgcgctacaaatgggttagtgactggtatcgtcaggccatgaataatttttggattcccgaagaaatcaatctcacccaagacaccaaggattatcctcacctggaccaggcagagcgcaccgcctatgataaaatcctgagttttttagtgttccttgattctttacaaagcaataatctgcccaccatcagcgaatacatcacagccaatgaagttaatctatgcctccatatccaagcctttcaggaatgtgtacacagccaaagctacagttacatgctggattctatctgtagccccgaaaagcgtaacgagatcctttaccaatggaagacagacggacacctgctgaaaagaaatacctttataggcaattgctataacgaatttcaggaaagtcaggatggattcacattgatgaaaacccttatcgccaactatatattggaaggaatctatttctatagcggattcatgtttttctataacttgagccgtaatggaaaaatgtcaggttccgcacaagaaatccgatatatcaatcgagatgaaaacacgcatctgtggttattccgcaacattattctggaattaaagaaagaggaaccggatttattcacccccgataaagtaaaaatatatgaatacatgatgcgtgagggggtcaagcaggaaatagaatggggacaatatgtgataggagacaatatacagggactcaaccggaaaatgatagaagattatattcaatatttaggcaatctccgttggagtagtttaggttttggccctctgtacgaagaaaaccataaagagccggaaagcatgcactgggtatctcaatattccaatgccaatatggtaaagactgatttttttgaagcaaagagtacggcttatgccaaaagcacagctttggaagatgacttataacccatttacaaaataattttgctccgcatcttaaaccgttaagatacggagcaataaatgacctgacagaaacatttccattaaagactatcaataaacagctgtcgccacctctttcacattatccaccgcacccactgtataaaaatgtatccccggaaccccatatgctatcagctcccggcattgattgatacaccactctatgcctaatgcacgcgcttctttatcatccttgcatttcattgcttccacaaccaattcctgtggtaaatccacattgaacgttttgggaataacactgagttgtgatagcttggaaaaaggtttgatgcccggtacgataggaacattaatcccctcttttcttgcacgctccacgaagtcaacgtattttcggttatcataaaacatttgtgtcactacataatcggctccggcttccactttcttttttaaccaatataaatcttgttccatgttgggagattcctcatgcttctccggatagcctgccaccccataacgaaaaggagttaaaggagcctgaatcggcgttccatcaataaatttgccttcattaaaagcattgatctgctcttccaactccaaagcatgggcataaccatctttctcgggaacaaaagaagattcatcttttgccttgtcaccccggagtaccaacagattagtaatacctaagaattgcaaatcaagcaatatatattccgtatcttcacgcgagaaaccactgcacaaaatatgcggtacaacagtaatatcatatttattatgtatagccgcagccaccgctaccgtacccggacgccgccgataacgattacgttcatataagccaccccccaactcgcgatacacatattcgctgcgatgagtggtaatattgacataaagaggatcaaactcccgtaatgtatctattgtagcatatagtttttcaattccagtacctttcaacggtggaagaacctcgaaagaaaatgctgttttcttttccttatttatcaactcagcaatacccatcttttttgacctttttacttattaattccgataaatccatataacagacagctatatagaagatttatctgtatattaatcacagtgcagatttatttcttcacaaagataggaatagcagattttacatccaataaagcattttattttagataattattctaaataaagagtatcaaaagaattattatctaaaataacctgttcgaaagtcctataacaggttatttattctatgacgcaaattgccgggagagggcggacagcgctcctctcccggcaataatatatacaaattaaaaactcaatttcactccggcaaagtaagaacgcggcatacccggtccataaatataaccggagtcacgttttgccccccggtcaaagtcactttgatacgcattaaagatattatgtactccagcattgacctgcatggttatgcctttatacaaattgaaatcataaccggctttcagattcaattcaaagaaatcaggtgtattcacagcaatgtccttatcaataaaacctgctttatgttctaccatcatactaccggtataagtaccggataatgcaatagtcatcggtacgaaagggttgtatgacaaagtgaaatatccataagtattcggagtacggaacatttttttctccatcggaaccgtttcatcatcactccatgcacgtgcctgcttgtattcggccttctgcatggtaacgccggcctgcaattgaagtaaggaacggtaagcaatctttccttccaaagtcaaaccatataccttagctcctttctcgttataccgttcattgataataataccgtcacgctctcctttctgacgtaaggcaaatacgtctgaaagcgaagtataaaaaccttctataagcaagtttccctgaaaatctccccaacgatgatacaaatctcccgatatactcagactttgtgatttttcttctgtcaagtcttttgccagttcaatcatagacacagtcccacctacattttctatatgcaaatcttcatcaaaggcctgaggtgcacggaatccgaaagaatagctggcacgcaggttcatattttcggtcggattgtaacgaagattagcacgcggactgaagattacatgatccaccatattatgtttatccaaacgccctccaagtaaaaagctccactgcttgttcttccattcattctggaaaaatgcactggctatacggacttcttgtttggtataacggttatacccccacatatcatccgtcaagttatcctgattatattccagtcctccggtaaaatcggcaggcataaagaaacatttatcaaaactatagatatactgcgatcctgtgacccaggtaaaatccgtggtcgcgccatacgcattcacatcttgtcctccaccataataactgtcgcgtcctgtatgctgtgcagaagcatatacactcagccgctgtttctcatccggagagaaataatcaaatttcgctcccccgctattgatagtatgctgcaattgttcggctatatccgcttcatggggaggtcggttcagtttattcccgccacgacggaactcactgagatgatgatattcaaaagtcagttttgaatatgtacttgttttgataaaagaacgaaaaccgactgtctgatttttcagttttggcaattcggtgtagccatcgccatcattgtcataaccgcttctttctctgttctgtccaaaaatatacaatcctgccttatgattatcagtcactaacgaagcattcagtgtcgtattattatcccaagaagaagtaccgcctatgcctgtcagagtatgtgtcaactgccctgagttccgtacaggctccttggtgattatattaatggttcccgcaatggctgaagaaccgaacaaagccgaacctcctccgcgcatcacctctacacgctcaatcatattggcaggtatctgttccaatccatatacaccggccaaggcactgaatataggacgcgagtcaatcaatatctgcgtataagggccatccaacccattgatacgtacttgctggaaaccacagttctgacaattattctcgacccgcactccgggctgaaaattcagtccttgcgacaatgtggaggaattagtgttctcaaacactttcacatccatcacattaaccaacgtaggtgccatgcggcgggtggtctcactacgattggcagacaccaccactccgtccaatgctatcaaatcctcttctatctcgaagttctcctccaaagttttcccttttcttaaagttactttccggctgaccgtcttgtaaccgacagcacttacctccatggtaaattctccttcaggcagatttttaagaaaatagtgtccactggcgtcagtcatagtccctatggtagttcctttcagcgatacgctgataaaagaaagatgctcttccgtattcttatccaatacatgacctatgatattggcatcggacttattcaattcattggcgtgcacagccgatgatgagagtagaaaacacactgctcccatcaagaaaaatatatatttcttcatgtgttgttattctgtttattaataaataaaaggatagcagtcagaagaatgaatccgcgaacagataatgtaacggaaaatcactccaccaacataaaaatatactatttaacaaacagcgggaggcgcgcgcaaataaatgccacaaccggttcgtatcagtttgatgcgttctacagccggcacagccagcaaacacagcaatacccaaaagaccgttgtggaagacggagtgaacaaactaccggaagcagcaaaagaagaaaggaaaaagatagtttccaattccacttctgtatgttgatgctcccctttaaacggatgcgagtgtacgataatcaccccatttaccacatgcgagtgagtaaaaagggtaatacctcccaaataggcaataaatatcagtggaaggaaaagctttagaatatgaatcaaatgcttcttcatcgtaacgggggcaaagatagaactatttccaatagcagtcaatacctattaatagtagttatggatttaaaaccgaaaacaagcctcttatcatgccaaagaaaatgcccattcgtccttagttgtcccttccttatatattaagaagcctataaatcagtatcaaacatcacaaaaatgtttcttttattttcagaatcccaaaagattttaaaataaaaccctacctttgcatcagatttggtgatgtaagtactttccgtatttgcataaaagggaattcggtcatagaatccgaagcagtgcccgctactgtgaaacccgtcaatgaaaagcaactctcgccatgccactgtttcctttgtaagaaatgggaaggcgcttttcagggtgaagccaggaaacctgccaggtctgaacatagataattcacgctttcccggggccaggaaagctaattattaattcttaaattatttcgatgaaaaagaaatgtttactgacagccttattcggctgcatggtggtgtgtgcatccgcccagatatcgttaagtggaaaagtagtggatgcccgtacaggaaagccggtggaaggcgctaacgtacgtttggaacaaactacaataggatgtgctaccaatcctaaaggagaatttttgttgaaagacatcaaagagggaacgtataccctgcgtaccagttgcctgaattatgctcctgtcactcagaaagtcagtcaaagtcaaaaagaaatggtgataaggctgaaaagtaccactttcaacatggatcaggtagtggtaaccggaaccggaactcaccacaagctgaaagacagtcctgtacccgtagaggtcatttcccaacgtgatctgcaaaatgccaatccatccagtttccaggatgccttggtgaaactggttccctctatctcggtgcaaaccaccgctatgggaacaaccctatacgtaaacggactgcctgataaatacctcctcgtattaattaacggtaaaaaagtagccggagatatttcgggatctatagattacgaccggatcaatatggatgccgtaaaacgtattgaagtattaaaaggagcatcttccgccctttatggcagtgacgccatcgcaggagtaatcaatatcattaccgatgatcctaaatctgcattgaatgtatcttccaatacccgtgtaagttctcacggacgaatttcagaatcagtcaacgcagacgccaatgatggaaaattatccgcacacttgaactataattaccgcacttcggatggatggcaactgaatccgtatgaggaaagcaagggagaactggtggaaaccacaaagaaaccggtctataagaatcattcgcataatgtgagccaaaccttgagctacgcagccacagagcgtttaagccttcatttgaacggtaatctttttatcagcgagaacgaccgtaccggagcctacgattacaacaaccggcatcagtcctatacagtgggtggaacagccaaatatctgttggctaagcgggcttcatatatagaagggaatataagcaccaccaatttccgttctttttatgactatataaatgatgcaaaaacgcataaaaccggtgacgaagtcctcagtaaagaccagacttacaccaatgccaatctaaaaggtgtattcaaaacccacaagaacaatacactttttaccggactggactatgtattcgaaggcttggagccgactgaaaccagcaagatgctgaataatgaataccaaagtgtttatacactggcagcatacgtacaggacgaagtaaaactactggatgcaatcagcgtagtggcaggtatacggtatgcctataatgaaaagtttaaaagccagttcacgcccaaactatccttgatgtaccaatattcagaactgaatgtacgtgcatcctacgctgccggattccgttcacctaccttgcaacaaatgtatgccgtttctgaaagccgtggacaaatcacggtcggagaccctggcctggacccggaaaagagcaatttctataatttgaatatagaatacaatcatcgtttgttctccattgccgcgtccatttatcagaatgacctgaaagacaagattgaagcggaagatataggaacaacgcccgaagatattgaaaacggcatcactcgcagacgccagtaccgcaatatagaaaaggcacgtgtgaaaggctttgacataggtttttcagtccgtcccttcacaggcttcatgttcggagcaaactatatttacacggacgggcgcaaccgtacggaagacatccgtttggaaagaacagtacgtcactcgggtaatttcaatgccagctggcgaaaaacatggaacgattatacattcaatattgcaatcaacggacgctatcaaggtacacgctggtctaaaacttacggcaacgcccccgcccaccagctttgggatatcaacacacgccattcattcaatttaaaatctgttgctctggaacccgccgtcggagttgaaaacattttcaattacacagatgaccgtccttataacagtaattatgcaactctgacaccgggacgctcgttctatgtcagtctgctggttcgtttcaagcaataaaactatttttagcatgacctctaaaaccagacttgtctatctgctcataacaactttctgcctggcaggttgcggctataaaagccgcaacccggtgagtaaaaacgggctaccttccgcagataccatacaaacagccctggccccccgttatgccaaaggcttcaagataactgttcgtccggatggagtaaagcttctgtccatctcggagccgaacaataaccatgcaatacccgaacttttcgccttagttcctaaaggaacaaaagccgagatacccgatggctataccgttattccgactccgacagacagagtgatctgcatgaccacgccgcaactggcaggttttaccggtctgaacgcttatgacaaagtggtagcgacaagtaccacccgccggatgcagaataaggaatggcttgcccgattaaaagacggacgggtgaaaaagataggaatggaaggaaactttgatacggaaatcatcattgcatcccaacccgatatcattttcgtatctcccaaccgccggggagggtatgaagtgatgaaagagctgaacatccctttggtcccctattgggctttcaaggaaacatcaccattggggctgtccgaatggatcaaggtagcaggtatgtttatcggtaaagaggaagaggcatgccaattatttgcacaaatggaacaacgctataacctgttgaaagccaaagtttccaatgtaaaacagcgtcccagtgtattcagtggagaaatgagaagagatacctggtatgtacccggaggacaaagtttctatgcccgcttgtttgccgacgcaggggccgattactttatgaaggataatcctgaaacaggaggtgtactcatggattttgaaaccgtatacgcccaaggatataatgccggctactggagagtgatgaatggttataaaggagaattctcttatgaagcattaaaggcttccaatccacaatatgctgatttccgggcttttaaagaaaagaaggttatttattgcaatctggaatggatacctttgtatgagaatcttcccctctcacccgatgttcttctgagtgacatgataaaagcttttcacccggaactacttcccgattatcatcctgtgttttattcgcttctggaaaaagaataagtattccagttctcatgcttatggtaacaaacagttttaatccggcttatctatttcactattacaaaaatggctgaagtctcggacttcagccattccgtaaaaggttattccaatataccggcaatatcctccgccatctgcttgtcagtcaaccggttggttttcatcagctcatccagattatagcggtctgcaaattctttacgaagtccgtaattcagcacccgcatttcagaattaccataataacgcgctatcttctcgccgaatcctccatccagcaccccgtcttccaacgttacgacaatacgatgccccactttcaactcttccagcatcggttcgtcaagccctgttatgtaacggggattaatcaaagtagcctcaacacccgactcttcccgaagcttattcttcaaagcctgtcctaaatcatagaaagaacccaatgcaagaatagcgacagtttctcccctggctgtcattttgtagcggtttaactcgctataatccgtgtcaaactcttccttacgatgcaccactgccactcccggcacacggatggcaacgggatattccgtctggcggacagcccattccaacatagcaaaatactcttcggaacacgtaggagccagataaaccatattcgggatattgctgataagcggaatatcgaagaaacccagatgagtcacatcgttcattccggctactgtccccataaacacagtgatcaccgccggatttccattgatacacaaatcctgagacaactggtcatagcaacgctggataaaagtactgtaaaccccgtacaccggacgtccgccaccggcagcgatacccgatgccaatgccacggcatgttcctcggcaatacctacatccacaaactgacgccctgcctgtttccggcgttcaggagtaaaacctatcacagtaggagtacccgaactgatggcaacaaccgtgtggtcctccttcatcttctccaacaaaaacttcccggtcaggctatggtaatcctccataccgctgcaatccaccttcggcttacccgtttccagatcgaaaggcatctcccaatgaaattcctcccggtcggcttctgccggagcgtatccctttcctttctgtgtgtgaatatgaaccactgtgggacgtgatgtatctttcaccttggcaaaagccgcaaccaaagacggaatatcattcccctctcccacataaagataatccaaccccagagaacggaagaaattacaggacgaccgtccctccgtgtcgcgcagttctttcaggttctgatagagcccgccgtggttttcggcaatggacatttcattatcattaaccactataataaggttggttcccatttctcccgcattgctcagaccttcataagcttctccgccgctgagcgagccatcccctatcacggctatgatattctcgtgtccgcctttcagatctctggctttggcaagaccgcaagccagactgacagaggtggaagtatggccgatagtgaaaaaatcgtgcccgctttcccggggattggtgtatccggacaccacatcataatcctccggattcaggaaagcacccttacgcccggtcagcatcttatgtgtataactttgatgggatacatcatataccatcttatccgtcggtgaattgaatacatagtgcaatgctattgtagcctccaccattcccagattaggtcccacatgtcctccgtgagcacttaacttggtcaataatgcattgcggacttcacctgccaactgtcttaactgttccgcagaaaactgttttatgtcttgcggagaatttacttgttcaatatacatcgttctacctgtttaaatgatttcatctgttgtcttgcttcattccgatgcggacaaagccgctttcatttcacaatgcaaagataagccaggccccattcattctttgtagataaattacagatagaattaccatttttacagaagggaactgtatcacaaaaacatggtactgcaacccggttatcaattctgcgagagccggtaaccactgggggcgacacctgttattttcttgaaaagcacactgaagcactgcacattaggatagcctaacttccgtgccacagcagcaggcgtatgaccgtcctgcaacaacatgtgcctggctatatccagccgcttcagttgcaaatattcctccaaagtcttgccggtttcaaatttcagcagatcattgaagtaagcgacagacaaatcaagctctcccgccatatagccgggtgtgggcaacttgccgccttgcaaccttccggatgcgatatattccacaaacaaacgttccatgttttccaaaagagccttgttcttattctcacgggtaataaactggcgttcgtaataccgggtgcaataatccaacagaagttctatatgccgggaaagaataatactgctatgagtatcaatgggatgatgcaactcatcctctatattcgagaggcaacacgtcactttctctgtctcacgccgcgaaagatgcagcgcttcttccttgcgataatggaaaaaggtataatttttaatatgattcttcagtgaggtgcggaacaacaggtcaggatgaaatgccaaaagatatcctttatccggcaacgtattctccttactcatacgaaagatctcgccgggagtgagaaacaccatggtagcattggagtaatcatagtatttccgtccgcagcagcaacaaccgcccggacaatcctcaatcagcaagatagcatagaattcaaacttcaccgcatcctcttccaatgaaggattctccagattgatgatgcccacctgcggatgcaatgtcttgcaacccagacagcggttacattcatatacagtcctcaagtccaacatagtctcttgcattgcttgttacgacagaatactataaaagaaggttttgtgcacgatattcattcggtgtacagcccacacgcttcttgaacaaccggcagaaatgctgcggatattgaaatcccagtgaataggctaccctgctgacggtttctctcctgtcggacatccgttcctttgccagttctatcactttttcctgaatatattcctgtggagtcttgccggtttccttcttgaacatatccccgaagtagttggatgaaaggcacagtttgtcagcaaagtatttcacggtaggcaatccgtcgcgctcggcaagttcgccctcaaaataatcgtcaagcaacccttcaaagcgtgtcaacacatcacggttcgaatgactgcgggtggcgaactgacgttcataaaaacgcatacagtaattaagaagcagttctatatagtttaccagcaaggtcttactatgcttgtccactccccgttccagttccatacggataatcttcaggcaatctgtcataatattgcgctcatcttccgaagggtgcagcgcctcgctcacttcatacgaaaagaaggtatatttctttattgtttttccaagcgtggtcccccgtaacaaatccggatgaaaaagaatgccaagcacattcaactgcacacggtcggtggtcaatgtggtttccgttgtttgtcccggagcaaaacataccacggttccctcctgatagtcataactccgacgcccgtatttgatatcacaagctttctccaatttcagataaagtgcataaacaccatagttccagtgcacatagtccatctgccgggtagccttgttcaaatcaatgacactgaccaacggattcagtgtttcaagtccgtatagactgttatattggtccacactgtctaaatttaatatcttatccatcattctaacttgtttaatgtctgctaaaatacagctttttcagttatttgaaatattccggtcacaaaaataagaagttatccggacaaggttataaccccaattacggattatcttaccttagttaccgaatcttatcccatccgggaataaaaagaagagccggaatgttcctgccgggctacccactccatatatatggcagaatctgtaattaaggtcaggatacccgtaatttatctacaaagaacccaagcaaatatacctaaatttgcaacatcataaaatattaaaacgtatatttgaaccaaataacataaatcgtatgaaaagactcggattatttatgacggtaatcatgatactgtgtattaccgtaaacgcacagaaacagagcaacagaacattagtagcttacttctcggcgacaggtacaacagagaaagccgccaaacagatagcggaggtgacaggcggagccctctacgaaatacaacctgcaaagaaatatacctccgccgacctggactggcacgacaaatcctcgcgcagcagtgtggaaatggcagatgcctcgtcacgtcccgcattgcgttcccagccccaaaacttggcagcctatgataccatctatatcggtttccccatttggtggaacctggctccaagaatcatcaacagttttatagaaaaaggtgatttcacaggcaagatcctcattccattcgctacctcgggtggaagccgcatttctaacgccgaacaagaattaaagaaagcctaccccagcctgaactggcagaaaggcaggctgatgaacggtgctaccaaagaagagattaaacaatggactaaaaaataaatagtatgagaaagaatttaggagcaaaaccttttacctatccgcaaccggtatttatcatcgccgcatacgatgaaaacggtcttcccaatgccatgaatgcggcttggggcggtatcagtgaaatgaatgaaatcagtatttgtatcagcgaaggtcacaagacaacggccaacatcctgaaacgcaaagcattcacagtgagcatggcagaagccgggcaaatcatcgcttgcgattatgtaggcattgtttcgggcaacaaggttccggacaaattcgtccgtgcgggattccatgccacccggtcggaatttgtggatgccccgctgattgatgaattatccgtagctgtggaatgcaagctgaaggattacaatcccgaaacctgtatcctgcgcggcgaaatagtcaatgtaagtgtagatgaacgtgtactggatcagaatggaaaagtggatgcctccaaagttattcctgtcatcttcgacccgttcaataatgattatctgaaagtaggagaaaaagtgggtaatgctttctcggatggcaaggccttaaaataacggaatccgatatgatacaaacagcggaggcagcttcttccatacagaacaaactccggcaagccgattcctaagctctcacatccttgtgactaagcctttttgaacgaatgatttctatctcccaagcttgcggagttaaatccatagcctttggagttatctccataagcttgggagttaactccaaaggctatggagatagaaatcatccgtttaaaaagggttaagtgcaggaataaaaaggcttaaccatccccatagtgccccccaatgattccgccaacattttttcttcaaacttatctatcagcaaatctctataattcttagttccttttttaattctcaccggcaatatcctctgctttgccgacttcccgactacggcacattctgaatgatgccttattcattgttaagcctgataaaaaaaagatttccataatttatagaaagaaaagacttgtttctcccgctcaaataagtaactttgtacggttaagtttggctcctcatgccagccaccactttcagtccgtcgatgtaaaagcctgaaagcaagatgaaggaactactgtcaggacagcgcattgtcattcagaggattatattggctgaaagcactgaaggaaacttttaaatcagattccggaaaggaataattatataataaaaaatgaaaaaggcccaattaatcgtagccggcattggtcccggctcacccgaagatataacccccgctgtaatacaagcagtcaagaacagcgatgtagtaatcggctataaatactatttccagtttatcgaaccctatctggaaccgggcaccgaatgtatagacaccggaatgaaacgtgaaaaagcacgtgccgaacaggctttcgagctggcggaacaaggaaagactgtatgcgttatcagctcgggagatgccggaatttatggcatggctccgctggtttacgaaatgaaatgcgagcgtggcagccgggtggaaatagaagtattgccgggtatcagtgcttttcagaaagcggcttccctgttgggagcacccatcggtcacgatttctgtgtgatttccctctccgacctcatgacaccatgggaccggattgaaaaacgcatccatgcagccgcaacggcagattttgtaacggcggtctataatcccaaaagcgaagggcggtattggcaactctacagattaaaagaaatttttctgaaagagcgtgcccccgaaaccccggtaggctttgtgcgtcaggccggacgtaaggaagaaaccgtgacaatcaccactttgcaagaattcgatcccgaacaggtggatatgtttacagtggtattgattggcaactcccagtcttattatcgggaagggaaattaatcactccgcgtggttattaccgggaaaagaccaccgatgcgacaggaatcggtcaggagattatgataaacagtttccgtactattgagaaagaattgaaaaataaaaatatcccttcggatcacaaatgggcattactgcatgccatccataccacagccgatttcgagatggaaaacatattgcatatagatcctcttgccgtagaatgtctgtataaaatattgaatgaaggaaaagtacgtacaattattacggatgtgacgatggctgccgcgggcatccgtaaaggtgctttggaacggatgggcatcggggtgaaatgctatctgggtgacgaacgcgcggcagcattggcaaaagaaaaaggaatcacccgtacacaggccggtatacgtatggcagcagaggaacatccggaagctttatatgtattcggtaatgcccctacagcattgatggaactgtgtgacctgatacggaaagaaaaagcgcatccatgcggcatcatcgctgctccggtgggctttgtgcacgtttgcgaaagcaaacacatggtgaaacctttcagccatatccccaaactgatagtagaaggacgcaaagggggaagcaatctggcagcgactctggtaaatgccatccttacttttgatgatgcggaacaactgaaaccgggaagagatgtataagtccatgcaaacattctatataataggtataagcgataaccggaatcaatttctttctcctgaaatccggaacttggtttctcaagggaaagtcttctcgggaggaaaacgtcatcacgaactggtacacgcttatttgccggaagatgccgtatggatagacatcaccgtcccgctggatgcggtattctgccgttacgaggaacattccgaaataatcgttttcgcttcgggcgacccgttgtttttcggcttcgccaataccgtcatgagaaaactcccgtcggcaaagattatcttattccccaccttcaactcgctgcaaatgctggcacaccgtatattgctcccctatcaggagatgcagaccttgtcgctgaccggacgtccttgggatgcattcgactctgctttaatcagaggagataaactgataggcgtgttgaccgaccgggaaaagacacctgccaccattgccgcccggatgctggagtatggatatgacaactaccgcatgaccgtgggggaagcattaggcaatggcgaggaagaatctgtacgtacattctctttagaggaagcctcccaatctgctttccgctttcccaattgcctgatactgcaaagaaacaaagtgcatccccgtccgttcggaattcccgaaagtgaatttcatctgttgaacggacgcaacagaatgattaccaaaatgcctgtccgcttgcttactctcagtatgctgacattaagggaaaagaaatcattctgggacatcggtttctgcaccggctctgtttccatagaagccaagctccaatttccggaactgaaagtgacagcattcgaacagcgtccggaaggtaaagagctaatggaacgcaacagtcgtaaattcggcacgcccggcattacaaccgtcatgggtgattttctggaaacggaactcggcgggcttcccgcccccgatgccgtatttataggtggtcatggaggaaaaatgatagagattctacaaaaaatcaaagaagtgctgttgcctgacggagtcattgtattcaattcggtttcggaagagagcaaggccctgttcacaaaaggtataacgcaaatcaacaagaaggtaacacagtgtacccgtattgctgtggatgcctttaatccgatagagataatgagagcggaataaatgatttaaaacagataacaaatgaaagcaatcatactgatatcagaagccagcctgccgttggcaaaaacactacaaagagagttgccggatacccttatttataccaaaaacgaatgcgaaggctgtatttccatcacatcctgccatcggttcatagaggagcatttcaatgacttcgacagcatcatctttatcggtgccatgggaatctgtgtacgcagcattgcaggatgcataaaaaacaaatataaagatccggcagtggtctgtgtggacagtacggggcgctttgtcatttcagtactttccgggcatgtggggggagccaatgaactgacccgccatattgccgccattacaggaggagaagctgtgattaccacccaaagtgacaatgccgggttatgggcgctggacacgctggctggaaaatatggctggaaaataactgttcctcatgcaaaaatgaacagactggtcacactttttgtcaaccgggaaccaacggcgctgctgctcgatataaaggataaaggtacggagtatctggaacgcacgcttcccgcacacgtaaaagtgttctatcatttcgaagacatgccccaatcggaattcaagttgattattgctgttacaccttatatatatagtgcggagattcccatgctctgtttccatcccgccgtcctccacttgggaataggttgccggaaacaatgcgatccttcgggcattgcggaatacatagaagccgtgatgcacagacatggtttgtgtccgttctctctcgcctccctcaataccatcgaactgaaaaaagacgagcctctgctggaaatcctccaccggcgatgggccgatacggaaacccatatttatcctgcggaagaactgaaagatatcacagttccccatccgtctgaaaaggcattcgaagtgacaggcgtctatggagtggccgaaagcacagccttgaaaagcagcggtgaaggaacacttgtattggaaaagcaaaagggcatgctgacagaaggaaaccacttcacttttgccatagccgtcagtgcgacagccatgcgtggcggacatatagagatagtgggtgcaggtcccggtgatcccgaactgatttcggtacgcggaaaacgaatgttggagaaagcggatcttgttctgtatgccggaagtcttgttccccgcgaactgaccttttatgctaaagaaggagcgaccgtacgcagttccgccggtatggatttggaggaacagttcgccttgatgaaagagttttatgataaaggattgtttattgtacgcttgcacacgggagacccttgcatttatggagccatccaggaacaaatggctttcttcgaccgctacaagatgagttatcatatcactccggggatctcctcgttccaggcggctgcggcagcattaaggtcacagttcaccatccccgaaaaagtacaaagcataatcctcacccgtggggaaggccgtactccgatgcccgaaaaagaacaattacataaattggcgcaatcgcaaagtacaatgtgcatttatttaagtgcgggcattgtggaacaggtacaggaagagctgatgcaggcataccctcccgaaactccggttgccgcctgttataagctgacttggaaagaagaaaagatttatcgcggagagttgaaggatttggctaagatagtacgtgacaataacctgacgctgactaccttattggtagtaggcgaagcgatagacaaccggaaaggtctgtcccgactctatgcgcacgagttcaaacacttgttcagaaagtaaaaaaagaatcattcacatccagcctatgatactgattttaggaggaactaccgaaggacgcaccgccgtgaaagttgccgatgaagccggaaagccctacttctactctaccaaaggagaatggcaggagatacaatgcaagcacggcatccgtatcaccggaggaatggacacggagaaaatggaaagtttctgccgccaaaacaacatccgtttgttggtggatgctgcccacccgtttgcctcccaactccaccggactgtggatgaaacaagccggacgctacatcttcctgtcatacgttttgaaaggaagtatcctccacgcaccgaaaacatcatctggtgtgaagactatgcagatgccatttaccggttagagaaagcaggaaccgatcgtctgctggcactgaccggagtacagaccatcgggaagttacgcccttattgggagaaacatacctgttggttccgcgtactggaacgggaaacttccatcacattagcccaagaacaaggcttcccgaaaggaaatctggtattctatcatgccggagaatccgaagctcttttattagagacactacatccacaggccattctgaccaaggaaagcggagaatccggaggattttcggagaaagtgaaagcggcacaggctgcaaaaatcccggtctttgctataaaacgccctccccttcccaggcatttcatgatcgttaccggtgaatatggattgagaaaacagatagaaaagaacatccctgctttttacccgttgagaagcggctacaccacaggggcctgcgctactgcagctgcaaaagcagcattgacggctctgattttaggggaagaacagaaaatgatatccttccgccttcccgatgacgaggaaatgaccttaccggtagcccatacagaaatagaaaagaacagtgccacctgcaccgttgttaaagatgcgggagatgatccggatgtcactcacggcgcatccattgtggtaacggtaagttttagcaatcacccggacatccgtttcctgcaaggtgaaggagtgggacgagtcacccttccggggctgggattggaaatcggggaacccgccatcaatcgcatcccccggcaaatgataatgaaagaattatcggcgctttatgacaaagggctggatgttaccatttccgttcccggaggaaaagagttggcacaacgtactttcaatcctaaactaggaattgtggacggcatttccatcattggaacttcgggcatagtccgtcctttttcttcagaagcttttgtcgaggctatccgcagggaagtggaggtttgtgtggctgtgggctcatccagactcatcattaattcgggagcaaaaagcgaacgttttgtgaagaaggagtatccgggattacctgctcaggcttttgtacattatggaaattttataggggagacactcaagatagctgccaagcttaaggttccattggttactttaggcattatgataggcaaggcggtgaaactggccgaaggaaatctggacacacacagtaagaaagtggtgatgaataaagaattcctaaggcaggtggcaatggaagccggatgctctccggatgttgaaagcatgatagaaaagttgacattagcccgtgaattatggaccttgctgtctgaagaagacagcggaaagttctttccgtgtttgttggaacattgttttgcacattgcgtccccttattgcccgaaggaaaattgacaatcctcttgattgatgaagaagggaatattcctttcaggatacaataactgattatttagacgctgctgctaaacggaagctaatatagcagtgacttgttctaacaattcctctatggtatctacctttatcgtcctcccggctaccgggtggataatatatccactggtagtcatatctcccgtttcaatataaaaatcggactcaacacgccggcttgccagaataccattccgctgcaaggctttccgtaccatcgcatacttatttccatgtcccaccagacggacttctttttcaaactcattgtcaatgcggaacagtccggtttccatatcaaaaacaatacccttacgagagaaaaaattactcaggcatccgtctatggaaagatcttcaggagttcctatagtcactccattggctttatccatcagccaaatcttatcagcaatctgcaaagctaactctaaatcatgggtggaaagaaaaatcgtcttgttggtagaacgtgacaaatgatgaagcaattgcataatctccactttactggggaaatcaagaaaagcagtcggctcatccagaaaaatcaccggggtttcctgtgccaacgcctttgctatcattactttctgacgctcaccgtcactcaaagtatgtaccatccggtatttcaaatcctcaatccttaccagcgcaatggcatcgtttactgtattcttgtcctccttgcttaaatttccccagaaaccggtataaggactgcgccccatacccaccagttcttccacggtcatgttccgcaggctgcatttttcggtcaataccactccgataactgtcgccaactgtttatcggtgtaatccgtcagtttctttcccattatttctatctctcctcctacaggcggctgaaaggcagacaaagtacgcaataaagtagatttccctactccattcgcccccaaaagacaagtcagttccccactgcggatagtagcatcaatgtccttcgctacaatcttggtcccccccttaccgggataaccggtagtcagtttccgaatatgtatagtttcttgattcatcattactcattcatttcattgcgacgtctattgaataaaaccgacatcactaccggagcacctaccaaagccgtcaccgaatttaccggcaatgcaccttcgaaaccgggcatacgggcaatcagattacataccaatgccaatgacgcacctgccagtaaagaagcaggcatcagaatacgatgatcggatgtgcggaacattcccctgcaaagatgcggaacggccagccccagaaaaataatcggaccgcaatatgcggtaacaatagctaccaatactcccgaacaagtaatgacaagcagacgggcacgttttatattcaatccgagattccgtgcgtatgcatctcccagcagcaaaagattcaatgttttgacaagcaggaaggaaagtggcaacaataccaccatgatacatataaataaagtcatctgatctcccgatacacgggcaaaacttcccaacccccaaatgacatatgcacgaatatcctcctccacactgaaaaatttcagcacacctatcaccgcattggctatgtaaccaatcatcacaccgataatcagcaaagtaacattgccccttactttttgggaaacgaagacaataagtgccataatggaaagtgaacctgcaatagctgctatggtaagggctatttcccccataaagcctagcttgctcaaagcaacaccacccaaactgcccgaaagaagcaccacaaaagcaactcccatactggctcccgaactgatgcccagtaccgacggaccggccaaaggattgcggaaaacagtctgcatctgtaaaccgctgacagagagccccgcccccgccaccaatgcggtaagcgcctgtggtacccgtgatttccaaataatattttgccatataacagactcattccctgttccccaaaggatattccacacagcacgaagcggtatggaaacagaacctaataccagattcaggaagaaaaacagaaaaatagaagccataattaacagcatataaaatgcaacaggtcgtttcatatactattttcctatttaagcaattcataatatcccggttggtgaccggacaaaagctgcggatgaaagatttgaatcaaatctgccagaacaacttccggttctgtaggcatactctcataaaaaggtttttcacgcatgttacaataaatcacccctttctctttgtatgctttaaaatcaacataacgggcatcttcctctttcaacgtgttataagaaaattctccttgatagctattcacaatacgccaataatcggcacctgccgcttggctgtaaactgtttcaaaatcgagggtgactcctccagactgttcatcgtctttcaaaaaataatcggcaccggcatctttaaacaattgtgcgagaaaactcctccctcctacagcataccaattgccgccccgcaattctccactgaataccaccgggcgttttgtcacccgaccggtcagttccttcagctcgttatatcttttcttaatagtggcaaactgctcattagctttatcttctcttcccaataacaagcccacaaactttatccattcagcctgtcccaaaggagtcatttccttatatcccaaatgcggcatcaaaggaatgcctacctctttcaaagcatcgtacccccctcgtttaaaaggagagatcaaaatcaaatccgggtttacactcataatcacctcattatcgaaattcccttcaatacctatcttatgaatgcttccatctttcaaacgatcatttattttcttgttaaacaaatgacgtgtactggtgatacccaccaccgcatccagctcttccaacttgataaaattggaaagttgcagggaagtcatgcagataacgcttcgtatgggagtttcaataaccgtataatccgcaggtatgttttccgcttccacacctcttggcaccaaagcataatgaaaagactgactttctttattctgagggtcctgaatgtcaagcagacaagcctgatccgtataggttattttaaacccttgggcatattccggaataatcttcacaatagaagaatctgtcaatgtcttatgttccagattcccggagccctgtttgtgcttattttggcaggctgtaacagtcaataataacaaaaggcccgaagccaatattagttttttcatgttcttttctgtttttcagccaacaaaggtaatcaattctcttgctttatacggaatttttcagcacttttgcgtgcttaaaaactgtaaatacctacaaaagatgagtcatccgatctattttgtttctttaggacccggtgatgccgaactgattacattgaaatcattgcatgctttacagcaagcagacataatatattgtccatcaacggttcgggaaccagacaaaatcttgtcacgtgccgccaccctgttacataagctaggcatcaaaggagatatacacctattctcgctcccgatgagcaaagacagaacaaaagcaatcaaagtctatcggcaacttttcgaagaaatgaggctggaacaaaaagcaggaaaacggttggcggtagcagtagaaggcgatgcgggaatttacgcctccgttcactatgtactggatctcctcgaagaaaatggaatccccgtagagcaacttcccggtattccttcattcatcgctgcggaagcggccgcaaaactacatctcatcagccaaaaagaaagactggtcattattccgggcaatattacttcggacgaactggacatgtatctgagccatcatcatgtgccggttatcatgaaattatctcaatgtgcagacatagtacaggattacatggagtcccacccccaatacagttatcattattttgaaaatatatcgacagccgaagaatatcattcttcccatcaggcggaactgaaaagaagagtatttccttatttttccttaatgatcatctttaacgaacagacacggaaggatgatagtgcaaaatagcgttcagaataccttcaatatttacatcatctttcttgataactgtagatactaattgaaaagtgcgctgtattctaattgaaaagagctccatccataacttgttacaaaattactataagtttaaaatattcatttatcttgtctcattttttgtgtttccttaagcctataagacagtccggtcatattaaccagataagctttatgtgtaagcctgtcaaccattgccgccacaagcaccttgtcctttatgatttcattccatctgttaaaagccaaattagtagtaatgattgtagccttttttccggctcttaacgacaggtggttaaaaagcagttctcctccttccttgtcacaactgacatatccgaactcatcacagatgaccagatcgtatttttcaaaccttaattgtagcgtcctcagtgtctttgctgatttagcctcccttatctgggtaagcaggaccggcactgaagtaaacaatacggtaaagtcctgttggcaggcctttattcctaaagccgtagcaatatgcgtctttcccgttcccggatttccatacaggaccaggtttcttccctgtctgatgaagtccagtgtctccaattcaggtaatattacctgtgcctctttgggcatgtcttccataacaagctcatgcagatacttcatttgtggaaatcccgcagatcttatccttgatcttcttctacactcccttctcctggcgctttcctttccaagcaattccgtcaagaactgcagatggttccagttttcttcagctgccaatgaaagggtgcattccagttcctctttaaaggccagaagcttcagttctgcagcatagtcataaatggtttctttttctgatttcatatattataaacttaaatggttggtattatatcatgcacttcattgtatcctgtcatgagcgccgtgatgccttcaagcatatccacagcttctctttctatattctcctgttgtgccgggagaacaggcggttccatggtttcttctgtctctccctgtacgctaccatgcagcatggcctttacctggtccggagatatctttctgacaccacgtccggtcagctccttgcatgccgtgacaatgtccgttccggaaaatccattttttcgggcatagtccagcaacagaacaaacgtcctgttgtcctccttgaaatggatgtcatacagccttctcagttcttccggtgctctttgccaaaccacagagtggggcaatgcccccggtttacgggaaagtgtacgcaaatagtgctccagcttgatgcaccagtctccaccgcaataactgcgttgatgagaggccactttctccttcccgtgcaggatgacgattttttcactataaaccttgacatgtactttttctcccacaagagaatcaggtacggaataatgaacatttttcatgctgatagttgaccatttatccacaatgtactcatagacctcaaaacagcccagattaccgggaaaaggcttcagcgatgacaggtcagcttccagacgtgatgttttctccgctgttgaaagactgccttgctcgttgttgacctgcatacatacccggtttaaatgctcctgggcagaatgtatatcaccaaaatggtctgtcaggcagaaagctttccttctgacatattccacgctgcgctccacatgtcctttctcccatccggcccgtacattacagaaacggtactcaaaacaatagaaaccggacatcttcatcaaagcttctgtaggtttcttatcaccaccgacaaagctcttgacggctacacgcatattgtcatagaccatcatggcggggacaccatgtatatccctgaaaaagttacggtgggattccatgaaggcaagcgtattctgatgcctgaaaagataggcgtatctgccattgctatgcccgaaagtgaatacggccagataaaacttggttttgacgccgtcaataaaaagaagaacttcaccccagtcaaactcggcaatgcatccaggctcatagaacaaccggataaaggcttcgctctttttcttctctttgtatgactctatattttttatataactgcatactgtggcgtaactgatggtgtatccttgagataacagaaactggtggatatcctttttcaacatgcgctgtttgcgaagtccggtagctatcttaacggcattcttcttcaggcaaaatcctatcttatccttaatctcttgtgtgagccggcgaggacggcgtctggaactgtcatacctgggctggatggtaagcaaatcactcaaagcctcttctggattgtccgtgcggatggctgattcgtactttgaaagaatattgtcaacggtatgacggctgacatgaagttcacgagagatacgccgtttgctataaccgcatactctatacatgtgtattattgattgtctttctaccatagtcttcattttacctttgcatttggattatacaaaggtcattatacttatcctatggtggcgcaattttcaactggaatattggcgcacttttcaattagtatctacacttgataactaaaaaattgtggtacattccttctttccggtaacggatcacaatcgacttgagtttaccagactttgtgtactccttttctatctctgtgatgttttgcaaaggaaaaacatgccgaggcttcatccctcttatagctaaggtaaaagaatcaggagtaatagtataaacagacaataaccttacccccgttatcaacagaggaggagtcaggaccagcaaagatgcatatcttccatgcgctataaaaaggcatgtacacgccaccaacataatagcaataactgcccaaatccataaaggctagccgggtctgaattcttgtttttccatatgccacatctatcttgtatagatacaaaaatagggagattcagttttataaccaaatctccctcaaggaatttataaactatttctaacaattaatctgattagagaataccctttactgtttccagcatacccttttcttgaatagagtcaagatcagcttttactgcggcggtcaaacccggaatgttgttcaagttctcaccccaaatagattctgctgccaacacgccttccgccactttctgagtgcagcctgtagcccaaagttctttcagcagattcatgatttcaggagcatcgttcggaacaatctcagcaccgtcagcacgaacaccacctttataataagtgatgatagccgccagtcccaataccaagcctttaggcaactcacccttacgctccagataaactttcaagcccgggaggtcgcgagtttcatatttagggaatgaattcagcatgatagaagtcacctggtgatcaacaaacggattgttgaaacgctccaaaacatcttccgcaaacttcttcaattcttctttcggcaggttcagggtttccatcaactcatcgaacataactttatgaatgtatttacctaccacttcatgctcgcaagcctcgcgcacaatgttgattccagacagataagctaccggagacagcactgtgtgaggaccgttcagcaaagtaacttttctttcgtgataaggagcttcagacggaacgaacaatacattcaaaccggctttgtcggcagggaattccttggcgacttcctgcggagcttcaattacccacaaatggaagatttctgcctgtaccaccagattgtcatcatactgcaatttttctttaatagcagcgatatctttgcgggggaatcccggcacaatacggtctaccaaagtagcatagacaccacaagcttcctcaaaccattgcttgaagtcttcacccaagttccacaaatcaatatattgatagatggtttctttcagtttatggccgttcaggaaaatcaattcgcaagggaaaattatcaaacctttgctcttgtcaccattgaacgttttataacggtgatacagcaactgggtcagtttgcccggataagatgaagcaggggcatcatccagcttgcaggcaggatcaaaagcgataccggcctctgtcgtattagagataacgaaacgcatttccggctgttccgccaatttcataaattcatcattctgagaataaggattcaaggcacgactgatcacatcaatttttgtcaggctgtttaccacctgtcctttatccaaaccctgcaagtttacatgatacagacaatcttgtgcgttcaacatgtcaaccatacctttttcaataggttgaaccaccaccacactgctgttgaaatcagttttttcgttcatgttgtagataatccaatccacaaacgcacgcaggaagttaccctcaccaaattgaatgattctttcgggacgttgagtctttgctgctgtctccttgtttaatgctttcatatttttaattatattatgtgtttatccatacctgtacttattgaagacgaatcagattttattgtgtactcatagtattcatgctttcttttaaatggtaatatatatttaagtttttatatatcatcattgaaccaagcatttaaaatctttaaatcttcgtcgcaaagatacaaataattttgttattccaaataaaatttctactttcgtgttcgataacggttaataaatctaaagagatgctctttgacatcttttttagaatgagtttttactgaaagtcaaaataaacaacaattatatagatataaaaagactacttatgaaaaactttatggatgaaaacttcctgcttcagacagaaactgcgcagaagttgtatcatgaacatgcggctaaaatgcctattatcgattaccactgccacctgattccccagatggttgctgatgactatcagtttaagtcactgacagaaatctggttgggtggagaccactataaatggcgtgccatgcgtaccaacggtgtggacgaacgttattgtaccggtaaagacaccacggactgggaaaaatttgaaaaatgggcggaaacagttccttataccttccgcaacccattataccattggactcatttggaattgaaaaccgcatttggaatcaataaagtattgaatccgaaaactgcccgcgagatttttgatgaatgtaatgaaaagcttgccaaaccggaatactccgcacgaggcatgatgcgtcgttatcatgtggaaaccgtttgtacaaccgatgatccggtagattcattggaatatcacatcaaaacccgtgaaagcggattcgaaattaaaatgcttcccacttggcgtccggacaaggcgatggcagtagaagttcccgctgatttccgtgcttatatggaaaaattgtctgctgtaagcggtgtcacgatatcttctttcgatgacatggtggctgctttgcggaaacgtcatgacttctttgctgaacaaggttgtaaattgtctgaccacggaattgaagagttttatgctgaagactatactgatgctgaaatcaatgctatatttaataaggtatatggtggtacagaactgaccaaggaagaaattctgaaattcaaatcagccatgctgatcgtatttggggaaatggattgggaaaaaggatggacccagcagttccactatggagcaatccgcaacaacaacaccaagatgttcaaacttctgggacctgataccggtttcgattcaatcggtgagtttaccaccgccaaagcgatggctaaattccttgaccgcctgaatacagaaggaaaactgaccaaaactatcctttacaacttgaatccttgcgccaatgaagtaattgccaccatgttaggcaacttccaggatggcacaattccaggcaagattcaattcggttccggatggtggttcctcgatcagaaagacggtatggaaaagcagatgaatgcactgtcattgttaggcttgttgagccgcttcgtaggtatgctgacagactctcgttcattcctgtcttatccgcgtcacgaatatttccgccgtactttgtgcaacttgctgggtaatgatgtggaaaacggcgaaatccctgcttgcgaaatagaacgcgtcaatcagatggtggaagatatctgctataataatgccaagaagttcttccaattctgacaaccgtcagaatgctgaatataaataaatgaggatggaacaaatgtgtctgcaaaagttttcactttttgttccatcctcattccagtcatagcaattcttctatagcctccgttatttccttgtcggtttttcccatgccatatcctcggatgactttccgtataatccgttctttatccaaaataaaaaagtacggagctgccccacccgtccggtaatcttctatcactttatcatctccatccaaaaacatataattcaattcctttctctttgcataattctgaagtgaatgcatccggctccaactttcaatggctaccaattcaaaatcttcttcttggtactttcttttcagttctttcagaaaagggatagaagcctggcaagctccacagcctattcctgttatatttaccaagatgaccttacttttcaaatcactcaatgacacgggacgctcctttatatcattcaatgtccattctggtgctttcttacccgtcagattagcggccatattcctggaaggagcgccataatcatatttttttgtttcataaccttgcggaacataatcgaaaacatcaaacctgtcaattgtttctttgtttatttccacattacagcaagtttccaccgatatattatgggacatcgctctccgtttcttataaggcaaaccattcgacttgtgaatccacagttcataaatagaggtcggctctacataaaaaggaggtggaggcatgtgataagctttaccaaagaactccacttgtgtatcttcgtttatgacaagtttaaaatgaaaataatccccacaatcttccaatgtggtaactatgctgtcttctgtttccaaagtatacctgacaatattcttgcaataattaaagaaaggtggggtcaacggtctgaaaggtaacggtctggtggtaaaattatcgatttttatttccttgacagcatgattcaccaacacacgtacttcaccattataaccgaattggaactctttaccatcatctgttcccaaattcacaaaacttgcccctatcgtagaatcagccggattatcgaactctttcaccatatattttctaatactggaaggaattgtatcaccaggattccagacttcgccctctactttatacgttgctgacttaatctgctctaaattatccaacacctttttcaaatactctctcttgtcatcttggccattcaccacatataccggcaataacaagagaaaaaataaaacagcttttgttctcatacgtttcttgcttttattgattcgcaaaatattttgctgacgcaaagaagaagaaaagcctgtatctctgcaaaatatttatctgaactctttctgaattttctcctttttcagaaaaagatcagataaaacacctgttttttccttaacgttatttacttttgcattcaaaattcatacgatgaaaagggcaaaaacacacattatcttatttatggcagtcaccatcaccgttctatatactgtttatatcgcttttcataatagtgccgaacgagtgaatacccaaatagaccacgctttcaaatccgccattacggaagattacaatgaaagacttgcctacatcagctattatcatcccgaacctacaaactgggatataaaaatgtatactatcgctcccagcctacaccaaaaagtaaaaagctacaccataagaaccagacaaggaaaaacaatctatacctttaaagacagtctggacgagcagaccgccaaacgtatgctgaaccaatacattctatcccaactaaaacccataaagcccgatgagttaaatgcaacctttagaaaaatattatccgatcatggcataaccggcaggaccggaactatttattataacaaatccatttcccaacacagcgaccaaagttctgcaattccccgaacggcatacaatactccccgatacatagtagatatcacccagaacatcaaggtacaagcatgggtaaattatgacttcaaaactattttacgacacatagacaacacactcttttggctcatcggacaattgatgattcttattttcatactcatttttcttaaaaaggaaaaggatactcaaacactccttacccgtatgaacatagacatggagaaacaagagttgtatataggaaacaaaaagtgcaacattcagaaattagacctcactttactaaatatgctttatgaaagagcaggaacttgcgtaagccgtgaagaaataaaaaagagtttctggcctacggatgataatgccaatgaaaaaatagatgcacacatcaaatcaatccggaaagttttaaaagaattccaagaatataaattaataacagtcagaggaaagggttattatctacgtattccataatccagattccaggcattcttttaaaacaatatccgctaaatcatctttccgaaaaagcctgtttctattttatttcctcctttttttatgtatatttgcggctcttttaacacaaaaaacgtggggattcactagaattgggagagcaacaaaatgaaaatcaaatttataagtctcgcaagcggaagtagcggcaactgctattttctcggaacagacagatatggcatattggtggatgcaggcattggcatccgtacaataaaaaaaacattaaaagaacttggaatcggactggatatcatccgggcagtattcataacacacgatcatgccgaccacatcaaagcagtagggcatttaggagagaaatttggaattcctgtttactccactccggaagtacatgcaggaatcaacaaaagttattgcatgaccgagaaattatcgacctgcgtacactatctgcacaaaggtgagacaatggaattggaagatttcgcaattactgcctttgaagtacctcacgacggaactgacaatgtaggctattgcatgaatatagacggtaaaatattttctttccttactgacttggggcacatcacccccactgccgccgaatatatatgtaaagcaaactatttggtattggaagcgaattacgatgaagagatgttgaaaatgggaccttatccccaatatttaaaagaacgtattgccgggcctaatggacatatgagtaaccgcgaaaccgccgattttttggcagaaaatatcaatgaaagtcttaaatacatttggctttgtcatcttagcaaagacaacaaccaccccgaactggcatacaagacagtagaactctcactacgaaacaaagggattatcgtcggcaaagatgtgcaagtcattgctttaaagcggaatacaccttcagatgtttatgagtttgaataaatttcgatgaaaaggtgaaaaaatggtgcaaaatgttggatgtttaaaagaaaacacctacctttgcaaccgcaaatcagaaatgaatgcactcttagctcagttggtagagcaactgactcttaatcagtgggtccagggttcgaatccctgagggtgtacgaaagaaaaacagtttgtaatttgcactcttagctcagctggtagagcaattgactcttaatcaatgggtccagggttcgagtccctgagggtgtacaaaaaatggtttgcattttgcactcttagctcagttggtagagcaactgactcttaatcagtgggtccagggttcgaatccctgagggtgtacaaaaggagtaacttcggttattcctttttttataagcccgtcaaataaaagcggctacccctcccgggccgccgctttaaaatacaaatgagcgtacagccattaatgactgcacaaggaaaatcagttatcttatatttttaataattcgctaattctgctcaaaactcccatatccaaatcctttaactcaataacatttagtgtatctgtaacataaaggtcattgcctaaaaataaatattttgcatgaaatatcctattattataaaagaaatccaaagctatctccctatcattctttttattgcataattctttaattctatttataacatacgatttttccataacaaataatattacagtacttttttacaattaatctgctacaaagataaaaaaccccttattaaacttcacattatttatagaaaagttatgtgaaagttattaacaattttattatattcaagctattaaatgaacaattaaaacaatatcagtgatccatccgagttctatttatcccatatacctaccttctgtttttttccatcattatagcacaagcttaaacaataaaatccacaagcaagcatctcctaccggaatgtcaagtttctccaaaggggaaacgtataaaagatgtatctaaaaatagttcctgaacaggctgaaaatagttaagagagaaaaatcaagaagattggaaatgaaatagcttccttaacaacaaagcagagaacaacaaggatttaatttacataatacaatccagacaggcagccttccggctgcctgttatacttctatttatctttaacatttccctttataggggtcagggttattttagccccttcaactatcggagttaatatatcaaaaataacctgtttgtattcagataaagcaatactcaataatagctcctcttttcttatcttatccgccaaagcattattatcctttttatatgattgatcctgcatatacagccggtaagtcttatagttttcataaaatgcggaaatagaccggaacaagcggccataattttccttcagattctgacgatcattctcactgaagtaatttcccggattagaaacaaacactgtatcttgaacagaaaccacaggctgtgataccacaggcagagaatctaccggcatcttctgatccaaatagcccagcaccgcttttatctcattctcattaactaagtctttcaagattttcaatgaggtatcataatacttcatcacttcattcgcattctccacactcatgctactgctatccataacgtgactactcttggagccaccggaacaagaggatatggagagggcgcaaagaaacacaccatacaataataaattcttcttcatactgccagtattaaattataataccttgataacaatatgaaatgataattgctcacgctcctgtcccgtttttttccaaattgctcttaattttctctaacaaataaaggcatccctgcattttgggattttcgtaacatacataggcctgttcaaacagcatatctaccgtatcctttaaattaggagtaaaagcagctttatctatctgcattgttgggggaagttcctgagaatcaaaccattttttcaactcattaacctcttcttgagtatatgttctctttctttcttttatcatattatatatattttctttaaaatggataacctactgcaaagtgaaaagcaaaatcacggctaaagcgtggtcggataacaggatatcgctttttacctgtttccacaggatttatggccttcatgccaccgtcaaaacgtaaaatcaaataatccagatcaaggcggattcccaaaccgtatgctacagctatctgtttataaaactcgttaaatttgaacaaaccaccttcctgtccggagtcatcacgaatagtccagatattaccggcatccacaaaagccgctccattcaatttccaaaacaaatgagtacgatattctatattcaagtccaattttatatcaccagcctggttgataaagtccattctcccatcctcactacctttataaacaccaggtcctaaagaacgtacagaccacccacgtacactgttcgcgccaccggaaaaatacctcttttcaaaaggaagcattttagagttaccatacggataagctacccccactcctatatgaaacacaaatgagttacgcggatctatcatgaaattctttgcaaaatcaaaatctgctttcacatattgagcaaaaggaatattcgccagcacataatcttctccatctttcggattagggtgaaccaatttggaagcagcatacagtaaattaccagcctcttcaatattggcacgaatagaataggaatttttagtaggtgtacgcatcatggcgtttcctgcactgttataggtaaagctgtaccctgtacgcacaacaagctgattttcataactggctttcaaagctgaattcctcagactcatgctgtccaaatattcctgaaaagccgatgactttctaggcatatatacataattgacatctaccaaatccaaacggtgttgcatacgtttcctgtcagtccatttataactccatgaagcagaagccagtgtacgcgagaattccggacgaacttgcgatgtgaactttaagccgacctctgaagtcgctctaattttctttttaaaattcgatgatagaaaaggaaacatgaactgagggaaattcaagctgctttctaccccatactccatgtaattatcattcacataatcctgtgaagccacccccaatcccgtaatggcctcataagcgccacgcactttcatcataaaggtttcggaacctttgaatacattgcggtgctgaaaagaaaccgaggcagccgctcccaagtcaccagccgaatttgttccttctacttcaaacgccatggatttatttttgttcttcgccaaaaatacgtatgcgtccagctgcgtaccattttctccattcacttcacgaaaacgaatattagagtatttcaaggcacgcaaacgccccagattggaataggtgttttgcacatcctgttcactatacagttctcccggacggatacgattgaaatcaaccaacacttgcggacggagaaaagcctttcccttgtaatacatactatatcctttgtatcgcaaagaatcaaattcttccaaagtaccttcctgtaccgacatgatttcatcatccgccagaaagttcacttctcccaccttgtattgtctatgcttctgcggcaaatcttcttttctacgctgataaggaagtaatcttaaagtcaagtccaccaaataggtatttctagccgtatccgcctgatagaccaaaaaatccttgttgaacttataataacccttattctgcaataatttggtaatccgctgccgttcagcatccagcacattcacatcaaacagcataccgggcgccaacaaactttgggcagaatcctgccgcatatagtcactgataaccaaatcatctatatcatacaccacatgacgtaccttataaggatgcccggcatgaatacggtaagccaatttcaatttgttcttcctcgtttttttatccaggtgcacagtagcccccatataccccatattacgtactgctttctctatttcctcctgggatttcagggcaacagattcatcatagattaccggagcatcaccaatcttcctaaaaaaacgattaatccatttagtggagtccacacctgagacgcaataagtacgcataggtatcttaaccaaattgaaccatttggcattaggattctgacgaatatatgaattgaatagtgacggcttcacctcctttgtttcagatacaatcctgacctcatccaataaatatttatcctcaggaataaatttactgaccgaacacgaggtgcatagtgctataataaatgtgcatatatatgggcgtgcgcttttcttcatacaaatccgtaaccttcgcaaatttatctacaaagatagatattaattgaaaatatcttcttagctttgctccaaatatttgttattaaatagaaattatcatgctgagcaaaaacaaaataaaatatatccgttcgttggaactgaaaaaaaaacgcaaagaagaacaagtttttgtggccgaagggcataaattggtaggcgatttattgggacacttcccttgcaagttactgattgccacttccaattggctgaaaatgaaccactctgccacggccaacgaaattattgaagtaacacaagaagagttgtcacgtgccagtcttcaaaagacgccccaagaggtattggccgtttttgtacaaccttcttatgatttaaatccggaagttattaaaagttctctatgcctggcgctggacgatgtacaagacccagggaatctgggaaccattatccgcttggcagactggtttggcattgaacatatcttctgctcgacaggaacagcagatgtgtataatcccaaaaccgtacaggcaaccatgggggcattggcaagagtaaaagttcattactgttctttaccacagcttattgaaagcctgaccgatattcctgtatacggcacctttttaaacgggaacattatttatacagaatccctgtcggcccatggattgattgtcatgggaaatgaaggaaaaggagtaagccctgaagtagagaaactgataaacaagaagttatatattcccaattatcctcaagaacgggaaacctccgaatcattgaatgtggcaattgccacagcagtggtttgctcggagttcagaagacgtttattgccttaaaattcatatttccatcggtatatgtaacaatttctgaatgggaaatactataacgctaccctaagcatatattataaacgtaccagtctgcttcccgttgtaaactcctttcccggcaaatcaaaatcagctatatgccatgcatatacaggctgttcacatcctgtttccagcatggcacggtgcaggaaatcagcaaacttctctccggaacaaatctccagcccatacatcggagaaataataatcactccgcctatccattgtgtcgcactaagctcctccttcaatgggaaatatgcacgcactctaccgctgtcttccaactccactacatatttagaataacagccatccgccgaaacataaagataatgacaagcaaaacgtctcatacccacaaaagataattaatttctgcgcttgattctctgaggacgatctgagtgagaatgatctgccgcattattctccttcatttcacgtggattcatacgggcgggaacatttttcctgatatccaccgattgaatcgaatctgctttcttctctgttaccaccgaatcagttccaacacgctgttccacagccaaactatcttttccggcaactgtcattgtatctaccggttcatgataacgggtcaaagcaatattattgataatcagtcccggcttattcgttgacgaatcactatccatatagtaaataaatccgctcacactcttgatggcaaaagcagaatcaggctttatatacaaagtctgcacaccggaacacgtgatatccttcacacgccccaccacagaatcattatcaaacaaaatattgaaccccatagtggctctccgttccccttccgaaaggaatatataatcagccgaccacaggaaagcatcctttgctttgaaattactatcggcgggaatctcaaaagtcaccttattcgccaacggaacatctgtcagccaataaagtttacggtcataccatacatccacagtatctcccggcaacgatgcagccggtttatcctcacgcaacgccagcaactcctgcatgcgttttttctcactgcggaagcgttcccccacctttttataaagaccggcaagttcctccgtgtgacgtgtgtaccacaccatggacgaatcgaaatcagcttcagtaatatgatacttctcgaagacataattcttatacgcctccttttgataattatcagaataactcagattattgcccatggagatacttaaatgataatcgtacaagatattctccatcctgtccggctggataatatcttcaggcacttgcttgccacaccccaccataaaagccgcacccagcagccacacccaagtaatattcctgcgacgcatcatttatcctttaatttcttctgctgacgggtgaatattcttattcagatacttaccgtaaaataacaacaacgccacaataccgcaactgatggcagcatcggcaaaattaaatatcggactgaaaaatatgaaatgttcccctcctattcccggtatccattcgggccagttggtttcaataatgggaaaatagaacatatccaccaccttaccatgcaaccattccgaatacccttcacctaccggaacaaaagaagcgatggtactatgagtactttcattaaaaacaacgccatagaacacactgtctataatattaccgatagcccctgccaaaattaaagagatacatacaatataaccagtcttataattctgtttcactatttttgccagataccagataatcaatcccacagctacaatacggaaggtagtaaggaataactttccgaatatttccataccgaaagccatgccgttattttctgtaaaatagatataaaaccaatctgttatgcggatactctcatgccagtacatattggtctttaccaatatctttattatctggtcgataatcagaactgcaaagacgataagaacagagagctgcccttgggtgagtagtttcttcatttattaaattgaaaattaattaatggttaatgattagccgttagcggttaatactgtaacatgacagtaaaactcataaactattaatcactaaccattaaccactattttatttctttccttcgttctttgcctcaatgctcagtgttgcatgaggtactgcacgaagcctttccttcggaatcaacttgccggtttcacggcaaataccataagttttgttttcgatacgtaccaatgccgcctgcaacccctgaataaacttcagctgacgtgccgccaaccgggtcgtttcttctttagacaatgtattagcaccttcttccaaaactttataagtaggggaagtatcgtccgtatcattaccgtccttattcatgatactacttttcagtctatcatagtcacgctgagccaattccagtttttccatgataatggcacggaattcctccagttccgcatctgaatatctagttttttcagccatataacttagttttaaaaggttaattattcttttacgacactcacataaagtgagaaatcatcaaaatttaattctgtaccgttcttcacttcatccactaattccagggagttagcaagaacctggttacaaatataagtattatattcatttaccgcatcatcggtttgaggatttttagataatgccacttttattttgtccgttatctcaaaaccactgctcttacggatattctgtatacggtttaccaattcacgggcaaccccctcacgacgcagttcttcggttacggtaacctccaaggccacagtcagtttaccttcattggcaaccagccatcccggaatatcctcactgaaaatctccacatccgttgtttcgataaccgcttccgcaccatcaagcacaaaggtatatttaccatttttctccaattcggcaatagcttcctgcgacattccggctacggctgcggcgacagctttcatctgtttgccgaatttcgggccgagttttttaaagtcacatttcacctttttcaccaatacgcctgcggctccgtctacaaacttgatttctttcacgttcacttcgctcataatcaagtcttttacggcttcgatgtgcattttctgctcttcgtccaccaccggaaccatgatacactgcaaaggctggcgcactttgatattgactttgcggcgcaatgccaataccatagaagtaacatcctgagccatctgcatacgcgcttccagttctccgtctatcaatgcctcattacattccgggaacttggccaagtgtacagaaaccacggtgtcacgacctgtagccgcaatcaaatccgtatacaaccggtcggcatagaacggagcgataggcgccatcagcctggccactgtttcaagacaagtgtacaatgtctgataagcggacagcttatcctgtgacatggcattaccccagaaacgtttacggttcaagcgcacgtaccagttactcaaattatcatttacgaagtctgtaatcaaacgtcccgccttggtcggttcgtaatcgttgtagcaagcgtccacgttcttcaccaatgaattcagaacagacagaatccaacggtctatctccggacgttcatttaccggcacttccgcttcctgataagcgaaaccatccacattggcataaagtgcgaagaacgaataggtattatacaaagtaccgaagaatttacgacgaacctcatccaccccgtcggtatcaaatttcaagttatcccatggagaagaattggtaatcatgtaccaacgcaaaggatcggagccatactgttcgatagcgccgaacggatctaccgcattgcccagacgttttgacattttgtttccgttcttgtccagaaccaagccgttagagattacgttcttgtaagccacactgtcgaataccatcgtagcgatagcatgtagcgtaaagaaccagccacgggtctggtccactccttctgcaatgaagtccgcaggataataagtgcggttgtccacaatttccttattttcgaacggatagtgcaactgcgcgtaaggcatcgcaccggagtcgaaccacacatcaatcaagtccgcctcacgtttcatcggcttgccgctttcagataccaagatgatatcatccacatacggacggtgaaggtctatcttgtcataattctccccgttatattcgcccggaacaaaacctttttccttataaggattgacggtcataaatccggcagctattgatttttctatttcattatacaattcctctacggaaccgatacaaagctcctctccttcttcactgcgccagataggcagcggagttccccaataacgagaacggctcaagttccagtcattcaagttttccagccacttgccgaaacggcctgttccggtagattccggcttccagttgatagtcttgttcagttccatcatgcgctctttggctgcggtagaccggatgaaccaactgtccagcggatagtagagcaccggtttgtcagtacgccagcagtgcggataattgtgtacatgcttttctatcttgaacgccttgttggcggctttcatcatcatacagatatagatatcgagtgattcggcggcagcggcagctttttcatcgtacttgccatctacagtaaactgaggatcataagcattcttcacccaccggccctgatattccttatatttctctacgtccacacattcctttacgaaagcctcgtccagttcgtccaacagatagaatttaccagtcagatccaccataggacgggtttcccccttcttgtttatcatgaacagagaaggaatacctgccgcacgtgccacaaaagcatcgtctgcaccgaatgtcggagcgatatgtacgatacccgtaccatcttcggtagttacatagtcaccgggaataacgcggaatgcctcaccggccgcttcttgccatttcccgttttcatccacagtcaccggtttcacccaaggaataagctgttcgtattccatgcctaccagatccggtcctttatattcacccactactttgaacggaatcagtttgtcacccggcttatagtcttccagcgccaattcttccgctttcttgttaaagtgagtataaagcaaagctttcgccaacactacggtcatcttttccccggtatatccgttgtaagtctgcacagccacatagtctattttcggccctacgcacaatgccgtattcgaaggcaatgtccacggagtagtggtccatgccaggaaataaggcgttccccattccgccatttcgggtttcggattcttcatcttgaactgtcctaccacagtggtatctttcacatcacggtaacagcccggctggttcagctcgtgcgagctcaatcctgttccggcagccggagagtaaggctggatggtgtagcctttatacaacagacctttgttataaagctgcttcaagagccaccacagcgtttcaatatagcggttgtcataagtgatatagggattctccaaatccacccagtaacccatcttatgagtaaggtctgtccactctttggtaaacttcatcacgtccttacggcaagctgcgttgtactcggcaacagaaatggtctttccgatatcctctttggtgatatgcaatgccttttccacacccagttccacaggcaatccgtgagtatcccatccggccttacgctttacctggaaccctttcatggttttatagcggcagaaagtatctttaatggtacgcgccatcacgtggtgaatacccggcataccattggccgagggaggtccttcataaaacacgaaagaaggacatccttcacgttctgtcatactcttggcgaaaacatcgttttcatcccacttcttcagcacatctttattgacctgtgataggttgagttgcgagtgttcagcaaatttcttactcataattttatatcgttttcttgtattctctaactaaaaggcaatgccttccaaaaattaaggtgcaaatttacaagaaaattagatagatagaaagttttgacgcttgtttttttaatcagataacggatactgtttcagaataactgcataaggcatgggaaaagcccctgttcttatcaaaatcaacagcaacaagaaccggttcttgttattgcagtcttttccggtatgccgaggtattttcccccgtcatattcttaaagaagcggctgaaagtacccacactttcaaagcccaaaatcaccgatatctctttgatgctgtgcgaggtatgcagcaacagccgtttcgcttcggtcaccactcgttcttgtataatcttcaaaggggaaggcataccgtaggcggcaaataaattggaaagcgtcttgggagaacgatgcaacaaagcagcatatgcctgtacctgttttttctccttgaagtgattgtccaccaacacataataacgctggatgatgtcaaaacctttttcattaaccggaaagccggacaactgcttacgggccagccgggtacacagaatgatgaaacgtttcaacagcaggcggagcatttctccctgtaggttatcccgcaggatgtattcggtaaccattctgtccaccacctcgtgcaacagttcggaatcggctatcgggagccgcagatgcactataccggaagttccgttaaacagcactccgctgcacgatacttctttctcgtgcttgtaaatgccgtaaaaattctcgttgaaaagaagagcaagatacctgcccgatacattcttgaactccgtgcggtgaagattactcacagagatgatttcatcctgctccatctctatttccacatggtctactatcaatgtcagtttgccttcctggacccatataaacttatacagactaccattgtcacagatgaccctgtctgtgtgaaacgcttcagtcagtatcatcgtttcctgcaaagatgtatcgtatgcgtaattcatcatggctaaactgttttgtgcatttctttctgttggtttatacaaagatagtgattttcacttatattaaaccaccctgttattgcacagtccagaagcaatacacataattaacaatctgatttacaacgcatagcacatatcacaatgtaaagaggaggcaaagtatcagaaagaaaaaaggaatttttgccatcattttaggaaatctagctatgatataaccctacagggaattcgtcaaccattaaaataagcgtatctttgtgccaagagatttccttctataatctagacgaaaaagaacacttgattcttttaacctgaactttggactttgattttctcccaataaggatttctctcataataaattcagattttatcccgccgggaggcaagataaggtcatgcaaaaaaatctcccaaaaaaagaagagggtgtccgccattgaaacggacaccctctattatgtgtatatccacattgccggaaaccatttatttccctgtttcccccatcgtgtttgcaggtttttcaataccttcgcttgtagcacgttcttccatacgctggatacgtgcgtcaagatcgggatgagtagagaacaactgattcagcttgctgcttttctttgctcctgcctcttcttgcaattttttcaatttctggaatgacaatgccatcgcccaaggattcttacctgctttcttcagaaattcgtaaccgtaatcatcggcggcgcgttcctgtttttgtgaataagtagcattgaccaatgcctctcccaagtcacccaactgggaatctgtcagagcagccgcttttcctccttgtgatgaaataccatctttcaatgccgatgtcagcaatgcggtacggaagccgttctttgagtccttgtgtgccacatggcctacctcatggcctattacccccaacagttcttcgtctgtcatgatatccatcaatgaagagaatacccgcacactaccgtctgcacaggcgaacgcatttacatcaatcacataatatactttgaaattcagcggcatcccttccacttcggtcaacccttcagtcagttttttcaagcggacagtatacggatcatcgtctgcacaaacctgattatgcttatccatccagtcaatgtactcctttacatactctgtcatctgctcatcggtcaaagtcaccgcttttgcagccttcacggctccccccactgccttcttcaaattaaactgggccattgcaggagttacccccgccaagcataacagcatgacggccacctttaataatgcttttttcatttttgtgtgttttagattaaacgcttcattttatttcttaagaaacggtacaaaagaacacatttttattctatctaccaatctttacaagaatatttttgccaacgccccgcctcaagcacccgccggaaagtgaaaagccatcgcgaatccacttcgcgatggcccttacccattttatatacacctttaaacaaaatgatacccacgccctaattcactaaccccttgcgggcatgagctgatctttttcttatttatttgcacgggcttccgcaatgtagcccaatgcttctttacattttgccgttacatacgcccagtcttccgcggctaccttgtcgccagggaacaatttagaacccatacccacacagaacacacctgccttaatccaagaagtcagattttcctgagtcggttccacaccaccggttaccatcagtttagaccaaggcatcggagccagcagacctttaaccaattttgctcccaatacatcacccgggaatattttgcaaagatcgcaacctacttcctgagcgaaacccacctcggacacgcttccgcatcccggagtataagccaccaaacgacggttgcacactttagcgatttcaggattgaacaacggacctaccacaaagcaagcacccaattgcaagtaaagagcggcagtagcaggatcaacgatagaacctactcccatagccatttcaggacactcctttgccgcgtatttcacaacttccgcaaatacctcatgagcaaagtcaccacggtttgtaaattcgaatgcacgaactccgccgtcataacaagctttcaccactttctttgccacttctgcatctttatggtagaatacaggaaccattccggttgaaccaatcttgtccaacacagctattttatcaaaacgagccataatgttatattttagtttaaatgaaagataggaacacaaatgatacaaataaaacatgtatcaaaaatttgcgttatttgcgtcattcgtgttcctataaaaaacaaatttagcgttgtacacgtccgctggcatcgccaccggccaatgcttccacttcatctacagataccaggttgaagtcaccgttgatagtatgcttcaaagcagaagcggcaacagcaaattcaagggcggcaccctgattcggtttggtcagcagaccgtgaatgatacctccggagaatgagtcgccaccacctacccggtcaataatcgggttgatgtcatagcgttttgattcataaaattcttctccgttgtaaatcatagccttccagccgttgtgagtagccgagaatgattcgcgcaaggtagaaaccacatatttaaagccgaattcttttgccatagccttgaagattcctttgtaaccttccgcattggtttcaccggcttccacattcgcttccggtttgaagcccagacaaagttcggcatcttcttcgttacctatacatacatctacatactgcatcaacggtttcatgatagactgtgctttttcttttgtccacagtttcttgcggaaattcaagtctacagataccgtaacgccatgacgttttgcagcttcacaagccagtttggtcagttcggcagccttgtcagaaatagccggagtgatacccgaccaatggaaccagtccgcaccttccatgatagcgtcaaagtcgaaatcgcaaggatcggcttcggcgatagccgagtgggcacggtcataaattactttgctaggacgcatggaagctcctgtttccagataatagatacctacgcggtcgccaccacgacagatgaaatcggtcttcacaccatatttacgcaatgcattcacagcagactgtccaatttcgtgtttcggcaatttagttacgaaataagcttcgtgaccgtagttcgcgcaactcaccgctacgttcgcttcaccaccgccataaacaacatcaaatgaatccgactgcacaaaacgtgtgtttcccggagttgacaatctcaacataatttcacctaaggttactacttttcccataatttcgtgattttaaattgttatatatttattcgtttaactttcaacccaattaaaatactggtttacatatccatagacgaatcacatcgtaaccttgtactcaacagaccactcaaataattcatccgtgtgcgcgcacaaaggtactatttatttttttaaaaccaaaaattgttatatatttgtatcgaaaaaaaataaattatcagtgtgcacgagcacaatatatataattaaggtatgaataaactgcccgaaagaatcagaatcaaggatatcgcgcgcctggcagatgtgtcagtcggcacagtagaccgtgtattgcatggccgcacaggggtatccgaagccagccggaaacgggtggaagaaatattgaagcaactggattaccagcccaatatgtatgccagcgcattggcatccaacaaaaagtatctgtttgtctgcctgctgccacagcacaaggaaggcgattactggaccgatgtggaactggggatgaaaagagccgtagaaaccttttcggatttccacatcaccctgtccgtgatgtactatgaccaatatgaatattcctccttcatcaatgccggtgaggaaatactgaaacaagagccggacggcgtattgctcgcccccactattcctgagatgacggccagattcaccgacaagttgcaagaacgggaaataccttatatatttatagactccaacgtggccagtctgaatccgctggcattcttcgggcagaaatccgaccaaagcggatactttgccgcccgcatggccatgatgttgggagaatgtcccaaagaaatcgttatcttcagacaaatcaacgaaggccgcctgggatcaaaccagcaggaaaaccgtgaaaaaggattcagaaaatatatgcaggagcattttcccgactgcaagatagtggaactgaacctctacgccaagcgtccggacgaggacgaggcgctgatgaaccgctttttccaagagaacccacaggttacgtgcggcatcactttcaactcgaaagtgtacattataggagaatatctcatcgggcacaacatgaaaaatttcaaactgattgggtacgatttattacaccggaacgtctcttgtctgaaagagggcgcagtggatttcctgattgctcagcaacctaccgcacaaggatacagcggcgtagagagcctgtgcaatcacctgatcttcaagaaagaggtgaaacaatgcaattacatgcccatcaccttgcttgcggtggagaacgtggatttctatctggacgcgcataaaaagtaaatctgataactaaaaatagaaatggaaacaaagtatttgaaaatcaatccggctgataacgtagtggtggctatctcggatttaaaagcaggcgaggccatcacggtagacggtcatgccatcacgttgaaggaagacgtgcctgccggccataaggtgacactgaaagatttcgcccaaggcgagaatatcatcaagtatggttaccccatcggccatgccgtgactgccgtggaacaaggacgctggatcaatgaaacccagataaagacaaaccttgccggactgttggattacacctacaatccggtcagcgtagacctcaatatcccgaagaaagacctgacgttcaaaggataccgccgcaaaaacggtgatgtaggtatccgtaacgaggtatggattatccccaccgtgggttgtgtaaacggtatcatcggacaactggccgaagcgttacgccgcgaaaccaactgcgaaggtgtggacgctatcgtggcattccctcacaactatggctgttcacagctgggcgatgaccacgagaataccaagaaaattctccgcgacatgattctgcatcctaatgcaggagccgtactgattgtcagtctgggctgcgagaacaaccagccggatgttttccgcgagtttctgggagattacgacacaaaccgcgtaaagttcatggtaacccagaaagtgggggatgaatttgaagagggtatgaagattctgcgtgaactgtacaccaaagccaagaccgatgtacgcgaggatgttcctttgtccgagttgcgtgtaggcttgaaatgcggcggttcggatggcttctcaggtatcaccgccaatccgttgctgggtatgttctccgacttcctgattgcacagggcggtacttccgtactgacggaggttcccgaaatgttcggtgcggaaaccaccctgatgaaccgttgccgcaccaaggaactgttcgagcagaccgtacacctgattaatgactttaaggaatatttcctgtcacacggcgaaccagtgggcgaaaatccgtcaccgggcaacaaggcaggtggtatctccaccctggaagacaaagcgttgggatgtacccaaaaatgcggcaaagcatacgttgacggagttatgggctatggcgaccgcctgaaagtgaaaggtttgaacttgctttccgcaccgggcaacgatttggtagctgccaccgccctcgcctcctgcggctgtcacatggtgctcttcactaccggccgcggtactccgttcggtacgtttgttcctaccatgaagatttccaccaactccactctggctaaaaacaaaccgggatggattgacttcaatgccggagtcatcgtagaaaacgaaccgatggaaaagacctgcgaacgctttatagactatatcatccgtgttgccagcggagaaccggtaaacaatgaaaagaagaattatcgtgaaatcgccatcttcaagacaggcgtgacactataatccaattttatccccaactttcccaatacccttacagccctgccttccctgttacgaaggtggggctgtgacctttttcccccatatattgttatacagcaagtctttttgtaactttgcacctcattttataaaatacaaattcatgaacggtgaaaaattaactccaataaccaataagcccagtctatgggcactcagtccactgctggtatttctatgcctgtatctggtgacctccatcattgtaaacgacttctataaagtccccatcacgattgctttcatggtatcctcggtctatgcggtatgcatcaccaaaggcctgagcctgaatgagcgaatgctgcaatattccatcggcgcagccaacaagaacatcatgctgatgatctggattttcatcctggcaggcgcattcgcccaaagtgccaaagatatcggggccattgacgcgaccgtcaaccttacgcttctcctgctgccggacaatctgctgctggcaggcatcttcctggctgcctgtttcatctcactctccatcggaacctcggtaggaaccatcgtggcactagttcccgtggcagcaggcatcgcagagaaaaccgacatgaacctggccttcatgacaggtatcgtggtgggaggagccttcttcggcgacaacctttcattcatctcggataccaccatcgccgccacccgtacccagggatgcgccatgcgtgacaagttccgggtaaacttcatgatagcccttccggccgctctgatggttttcggctactatattttcagagggatggacgtgatgacgacccacgacatccagtcggtggaatggatcaaaatcctcccctacctggttgtgttgggaaccgccatagcaggtatgaatgtggcactcgtactgatactgggcatcgccacaacgggagtgatcggcctgttcacggggagcatcggcctgttcgactggctcggctccatgggcacagggatcaccgggatgggtgagctcatcatcatcaccttgatggcaggcggtatgctggaactgatccgttttaatggcggagtggactatatcatccaaaaactgaccaaacacgtcaacagcaaacgcggagccgaactttgcatcgcggctttggtgagcatcgccaatttctgcacagccaacaatacgatagccatcatcacagtgggaccgcttgccaacgatatcgctacccgctacagggtggacaaacgcaagagtgcaagtattctggatactttctcgtgtgtcatccagggaatcatcccttacggagcacaaatgctgattgctgccaaactggcttccctgtctcctttgagcattatcgaatacttgtactatccggtagccatcgggatatttgccctgctgagcatcttcttgagataccccagacggtattcgtgaaaacaagcggcagacggttatattccaccacgcacagaccggctgaactctttcgcaatgtccagacgatgaaggtgaaagatttataatcttacagctgtaagatatagcatcttacacgtgaaagatccatatcttccgtgattaacggcgcgtacctggggggcaaatagcattcaacaaagatacgatatgcatttatccatgggcggtccaactcctctttcttccaaatccggaatcgtgcgtggtgtatccgcccgaacccggatagggaaaatctcattgatatagcatttctgtcgaggtgcaaatcctatgtttttgaagagttcaacaacagcagttatttctttttctttgttactgttgtttttcttctcttctctattcttttcttctcttataaagttttgcttaaagcttgcttgcaaacccccattaacacattcattatcaatacattgcagtgtattttcggttacattttcatcatcacttttttcaatcgtgtttttcatgcattttacactgttttccgcattgctttccgtgttgttttccttattgcctgcatcgtcattcgcttctttatccgctgccgtgaggacagtagaagtgattactttttcagctgtctgcacagtctttttcttgctgcttcttcctcctttgctaccggcggcggcacgttgctccgaaagcttattctgataacccatcacctcatccagatacaggcatcggaaatatccgtcctccgttatgacaaacaagttaaagtctttaatgagatgctgcagatcttccactgtagccccccattgttcagccaacaaatccagttcgttaaaatcgtgtttgtattcctgttgccttcgcaggaacaatatcatttgaatatataatcctattcccatgcatttcatttcggcattcagcttcatcattttgtaatccgacatcaagctgcaattcagccggataaactgttcggtgtaatccattcctttggtgtgttagtatataaatagattacaaagaaacaaaaaatatcaatagggtgtatagataattgccaccaattatgacattatcttcatttttatctcaaacaaatataaacaactagtacacaaacacttacacagcacattcaattcaagaaaaaagtataattctccagaaaagataaagttcttatcccctgcaattaatgaatattttttatcgccagaattcggagataaattcccaataaatgatcctatgttaaaacacacgctatatccgtccaaaggtaacagaagaagatttatgaatatttattttgaaaatatacataaaaggattatctttgcaccgcaaatgaatcaatgatatgaaccaattacagactacatacagcatacatcaccttacatcgggaaatacccccctgtgtaatcacttcattgtgcatgtacattggttcagcggatttgtttagatttccactcacacgtaatttattacccaactttcatcctacccacacacgtgcccgatgaaagatatattgcatgatggttctcattcggtgaaaccgtcgggttgtatatgttttactataaaaattgattgctatgtttactattatatctattatgtttgttggtatcggtataggatatgtattgcgcaacttgcagtttttacaaaaaatagaaaagagcacctcgctcactatcttcctgctactgtttgttttgggcatctctattggatccaacagcttaatcattgacaatttaggcagattcggatggcaggcggctatattggctacattaagcattctgggcagtatgctagcttccttcctggtatttcatctgttttttaagaaaggaggcagaccatgaaaggtagtttgattgttgtagcatttttttgtgcaggatgtatgattggagctgccaataatttccagtatgacatgcactctgtttccatgtatgtgctttatgcgctgatgctgcaagtaggaatcagcataggcagcaataagaaattgaaagaactgataaaaagcttacggccgaaaatgctcctggtaccgatggctaccattgcgggaaccttgcttttctcggcactggccagtctgctattaagccaatggagtgtattcgactgtatggcggtgggcagcggctttgcctattattcactgtcctccattctgatcacacagttcaaagaaccgtctatcggattacaactggccaccgaattgggaaccattgcgttactggccaatattttccgggagatgatggcattgctcggtgctccgctcatacggaaatatttcggacagctggctcctatctcggctgccggagtgaactcgatggatgtattgctgccatccatcacacgttattcgggaaaagacatgattcccctggccatattccacggaatactgattgatatgagtgttcctgttttcgtatccttcttctgtaatttataaaaaaagagaagcccgctgattggttaagcgggcttctttttcatatataatataggcgggaattatttcgcaaccttttccagtttcttcatgatagagaagatgaacaatgcggaaagcaagcagcacacaatcaatacactccataccatccacaactgcatatcaccccacaaataaccgatgatagctaccagatagttaccaatagcagtagccacaaaccaaagtcccatcatagcgcctttatacttgggaggagctaccttggaaacaaatgagatacccatcggtgacaggaacaattcggcaaaagtcaataccagataagtcgagatcagccagttgggtgaaaccaacgcgctctcggcaataccattggcttctacttcagcaggagtaggcagaccgaatgagccgaatgccagcaacatgaaacctactgcggcaatcaccataccgataccgattttacgcggagctgatggttcttttcctttctttgccaatgaaccgaatactgccagtgataccggagtcagagcgacaacgaagaaggggttaaactgttggaaaatctgaggaaggataggcaatgtagggtccatagtaccataattgactcctaaaaccacaagagccaaggtaacaataacgcctgaaatcaatttgcccttgcctgtcttggactggaacagtgagaaacctgcataaacggttacaataagaagagccagattccatacgctgaagccaaggcgatccagaccggttacctcatgtgccgtgtagtcacgggcgaagaaggtcatggtaagaccgttctgatggaatgccatccagaagaaaataaccacagcgaataccagcaacaaagcgacgatgcgttctttggtctgtgcgggagtcagctcttcttcgtgtacattggccggtttagcctgcttggagttgtaatcggcatgtttgaatgtagaacggaaaataacataaatagccatagaggcaatcaatgagatacatgccacaccaaaaccatagttataggcttctgacaatttatcaatataggtagtacagaaatcggccatacttcctgtgaaattctgtgcggtctgcatggcagtcagtgtggcctcgccttcggccgttatcgtaccgtccaggaactggtgtgccaaagaaggtatctggggtacatagctgaaacctgctttgcccaacacatagttggtcatggcagtagcggcagtcggagcgaacagggcaccgatgttgattgccatatagaacaaactgaaagcggtatcacgtttcgcgctatactcgggagcatcatacagattacctaccattacttgcagatttcccttgaaaagtccggttcccaaagcaatcagggcaagagcgccgaacatggaatacaatccgatattggttgccatcgggatagccagcagcacataaccggcaaacatgataacgataccggtagtaaccatcttgccataaccgaatttatcggccaggatacctccgataagcggcatgaaatacactcctgccaggaaactggcaaagattgttgacgtcgtggcggctgtaaagccgaatttcgcttgcaggaaaagagtgaaaatagcaagcatggtgtaataaccaaagcgttcgccggtattggcgagagctaatgcgtataagcctttaggctgtccttcaaacatagttgataaagatttaattaatagttagtattctttttttgcaaagatataacttttagtctatctgaaaaaaaaagagccacaaatgtgactctttttggcatatttattcggtgaaaagggaacaaatctctgctttcgtttcttttatcaggtcatcggccgctatttttatctgtaatccgcggataccggcactgatataaatgtacgggaatgcggtgcaagtctcgtgtatataggtggggaaatgctttttcatgccgatgggagaacatcctccccggatatatcctgtcaggggaagcagctctttcatgggaatcaggtcgcatttcttgttacctgagacttttgccgccatttttaaatccacctcgtgctcgccgggtatgacacagacaaaatatccggatttatccccatgaagcaccaaagtcttgaagacttgttctatgttctcgcccaaactggcggcaacgtgaacagcgctgaggtcattctcgtctacttcgtatggaataagctcgtatgctatcttggccttatcaagcagacgggctacgttggttttagctattttctctttcattgctggtatgccggttaattttccaattcttcttttataaatttcggggtatatcctttcttgcttccggccacttcctcaggagttccggcagcaagcacctgtcctccgccccttccgccttcgggacccatatcgatgatgtaatccgccagtttgatcacgtccaggttatgttcgataaccagaacggtattgcctttctccaccagtttgttcaatacattcatcagcacacggatatcttcgaaatgaagcccggtagtaggctcatccagaatatacatcgttttgccggtatcacgcttggacagttccgtagccagtttcacacgctggctctctccgcccgacaaggtggtggagggctgtcccagtttaatatatcctaaccccacctcttgcagcactttgattttattcagaatctgaggcacattctcaaagaactctacagcacgattgatggtcatgtccagtacatcggctatggatttacccttatagcgcacttccagcgtttcgcggttatatcgtttgccgtgacaaacctcgcaaggcactagcacatcgggcaggaaattcatttcgatggtcttgtatccgttaccaccgcaagcctcgcagcgtcctccggttacattgaacgagaaacgccccggcttatagccacggatcttcgcttcgggcagaccgacaaacagattccggatatccgagaatacccctgtataggtggccggattggaacgcggtgtcctacccagcggcgactggtccacattcaccaccttatctatatagtccagtccctccacactgtcatagggcagaggttcctgcaaagaacggtagaaatgctgtgacaggatgggctgcaaggtatcgtttatcagcgtggatttaccactgccggacacccctgtgacacaaatgagttttcccaaaggaaattccacatccacattcttcaggttgttccccttcgcccctctcagccataaggatttcccgttaccggggcggcgttcggccggtatctctatcttcatctgtccgtttaaatacttagaggtaagcgttcctgtctgaagcatttgtttcggagtcccctgaaacactacctcgcctcccaggcggcccgccttcggtcccatatcaaccacatagtctgccgccagcatcatatccttgtcatgctccaccacgatgacagagttacctgtgtcacgcaacttcttcaaagagttgataaggcggaggttgtcccgttggtgtaatccgatactcggttcatccagaatataaagcacgttcaccagctgggagccgatttgagttgccagacggatgcgctggctctcgcctcccgaaagggataccgaggtgcgattcagtgaaagataatccagtcccacatccaacaaaaacttaagacgggtacggatctccttcaaaatctcggcggcaatcatgcgctgcttgtcttccaaaaaagaatcgacctgttgcaaccagtcatacagttcgttaatatccatgcttgccagttcataaatgttcttgtcatggatacggaaatgcaacgcctccttgttcagacgcgctcccttgcattcgggacaaacatcggtcttggcaaactgttccgcccacttctgagcagtggccgacgcatctttctcctgcatcatctggatgtacttcacaatcccttcataagttacaaagtaatcggaagaggtatgaatcaaggtgctctttatcttgatacgctcatccgagccatagagtatttcgtctatcgcatcatccggcatatccttgaccggcgtcttgatcgtaaaatcatatttttcaagcaacgcctctatctgccagaaaatcatggcatttttatatttgcccaaaggcacgatggctccttcgtaaatggaaagattcctgtcgggaatcactttgtccacatcaatcagattcacataccccagccccttacaacgggggcaagctccctgcggagagttaaacgaaaaattatgaggagcaggttctttataagacagtccggtaacaggacacatcaaccgcttactgtaatggcgcacctcccgggtatcggcgtcataaatcataatcagcccctcaccctgctgcatggcagtggcaacgctctgtttcagccgtttgtcatccttttccgatacgaccaacttatctatcacaacttctatatcatgatttttataacggtccagcttcatgccgtgtacaatctcgcgcacctcgccgtccacgcggacatacagataacctttcttgcgcacttgctcgaaaagttctttgtaatgtcccttacgggtacgtaccaacggggcaagcataaatatcttcttaccctgataatcccggtgaatcaggccgatgatctgttcctcggtatatttcaccattttctctcccgaaagataagaataagcaactcctgcacgggcatagagcaaacggagataatcgtatatctctgtcgtagtccccacggtagagcggggattcttgtttgtcgttttctgttcgatggaaattaccggactgagtcctgtaatcttatccacatccggccgctccaaccctcccaggaaattacgggcgtatgcggaaaaggtctcaatgtatctccgctgcccttcggcgaagatggtatcgaatgccaaggacgatttaccgcttccgctcaatccggttatcaccgtcaggctgttccgtggaatttcaacatctatatctttcaagttatgtacacgggcaccgtatacattaatcagttctttttcttcactcatagtcttcttactctgcgtaatctttgcaaaattaatgcttcccgacgaaatatttaattaaaaagcctaataatattttctattctttctatataatgtgaataaaacagttttttttgtacttttgccactcagtttaatcaacacactgcaaatgaaatttattcgagcattatatcttatcgcagccttgtctgccagcagcaccggaatgatggctcaaacacagtcttccggctatttcctgcacaccatcaccaaagggcaaagtctttattccatagccagcatgtataatgtcactaccggtgatatcgttaaaatgaaccccggcagcgaccagaaaattaaaaccggtgaaacattgaagattccacaaaagaacatcggaacggaacagcagatgttccataccatccagtcgggtgaaaccttgtacaagctgacacaacgctatggagtaaccgcacaacgcatctgccaggcaaatcccggactgagcgcggagaatttccgtatcggacaggttatcgtaattcccgccaaggtgacggacagcgaggagataatcatgaacgaggtgaaagccgcacagactaccaagccggtcaccacttccaccccactgaaacccaattgcagggatatgcataaagtggaacgcaaggaaacgatattcagcatcagccgcctgtatggcatcacagaagccgaactgattgccgccaatcctgaactgcgtaccgaaaaactgaaaaaaggaaggttcctttgtattccatatcctaaggatacaaagactgaaacgcctgtggataatacgcctgccgtaatccccacggacgaccagctgtttaatgaaagcaagaaggaggcacgcaaaatatctaccatcaaagctgccgtaatgctgccattcatgacagacggcaagggcaaccgtgacgaacagacacgtatggtggaatactatgaaggcttcctgatggcagtagacagcttgaaggaaaaaggagtatccatcgacctgtactcatacgatacccataacaatacttcttccatcaagaacattctggatagaagtgaattgaagagcatggatattatcttcggcccggcttatcccgaccaggtgaaaccggttgcggaattcgccaagaaaaacaatatccggctggtagtaccttttacctccaaagggaatgaagttttcagcaatcccgccatctatcagataaatactccccaatcttatctgtactcggaagtttacgagcattttacccgcaagtttacaaccgccaatgttatcttcctggatgcagaagatggtgacaaagacaaagtggattttataaaaggactgaaagaggagttaaaaaccaaacgcattccttttaccgaattaaaaggggaaaatattactccggaatcattgaaaggcgcgatgaaccatagtatggataatgtattcatcccgacttccggcaccaacgtggcattgataaaactgttaccacaactgattgtgacctcccgtgacaatcccgactaccgtatgcagttattcggctatccggaatggcagacctataccaacgaccatctggccagtttctatgaactggacacctatttctattcttcgttttacacaaacaatttatttccggaagccgttcagttctcatcggcttaccgcaaatggtacagcaaggatatgctcaactcattccctaaatatggtatgctgggattcgatacaggatatttcttcctgaagggcctgtcccaatacggcaacaaactggaagacaaactggacaaggtggctgtcacccctatccagaccggatttaaatttgaacgcgtaaacaactggggtggatttatcaatcgtaaagtgttcttcgttcattttaccaaggactttgaactgattaaacttgattttgaataatgaaaaagtataagaacttcgggctgcttgtactggcattgctctttgcattgccggcagctgcacagttgggtgaagaacgtcataattttgccgtcggcatcaatggtggtctgaacatgagttccgtcagcttcaacccgaaaatcaaactgaacaccttgaacaccatgtctatgggggttaccatgagatatatgtccgagaaatatttcaagatgatgtgtggcgtgcaaatggaaataaactattcacaacgcggatgggacgaaaagatagaagatgattccggcaattcttacagccgcaccatgaattatctggaaatccctttcatggcacatctggcattcggcaaggatgcattgaaccggggagtgaaggtctttttcaatgcaggaccacaaatcggctttttcctgggtgacaacgaaaagataaactggactacttctacaacaagaccggaacacggtaaagaggtggagaataaatttgattatggtatcacagccggcgccggtctggaagtaagtaccggtatcggacatttcctgctggaaggacgttactatatgggattgagcgacttttacaagaactcgaaaagagatttcttcgaaagatcagcccattcattcataggcatacggctgagttatctgatagatattactaaataaaaaaaggactctctctcataatacaaaagcctgcaagatgaatcttgcaggctttttatatcatacataataattccctcagcttatctcaaacggtcgtatgctttaaccaatacctcatccttaccaatggcgcggatggcaagccaattcaaaatgatggcaaccaacggcagacacacagtccatgaaggagaaaatgtcatagactcttctttcaacataaaaataaaagtgaccaatgtggcataatacccgatcaacaaaatggtgctgaaaatagtcagacggatttgcaacatgcgttttttgaacaagaagatagtgccgaaagcaagaaccgcaacaaccagcaaaatcacaaacaaggcccatggagcataatctttagtaccatccgccatagtaagacacagatttgttaaagcggaaacactataatcacttcctatgtatgagcctacgggactacacaggcaaataataatcaaaatggtaacaacaagtaaataaacagattgaatgcgttgtatcatagtctctttaattttaatcatacaacccgtcattctaaacgcagtgaaaaacctgaaaacacaaagtgaatggttatcagattcctcactgcgttcagcataacagggctaatataatgtgaggtgcatcaaaatgtaccacagattactcagattgatacagtttccacacgaaacgactcatgtttcaaaatagaacgatccgtgtaacctgcggtaaagaccttttgcacagccccaaatgaaaaatcactgtagtttctctttttctttagcaggattacggaaataaaccttgccttcttcatattcctgagcagcgatcaatgtcggtttcggaagtttttcgtaataacgtgagatttcgatctgctctctattttcaaagacttcttccaggttatcgttgtatgaggcaaactcctgcaatttctttgaaagatcattcttcatctcaacactaatctggttggcacgtttgccaatgatagcaacagtttcataaatgttacctgtgtctgcacataaatccatcatgtcacgggtaacagtattacttggagcgtttgtctttttgtaatccataatttcttatttagttttattcattaaattcttttacgtacttattggcatccttgtagatgctctccacttctttagtatacttgctgtcgggaaactcgttcttgaaagaataatattcatctatcgtttcacgcatacgctcttctttcttttcttccacgctcgctttcgccatatcatatttggcacgcaagaccaggatagaaagatcttcgcgcatcttggtatagggatagtctttcaaagcattctgggcggtaacgatgcaagacaaatagttgttaccggtagtgctataagtactgtttcctgtataagagcccaaatcataatacaatttcgcagccagatagtctttcatcaccagcttgtcctgcaaatcaaaaatcatttgctgtgcatcctgccgacggctactggtagggaaatattccataaacatctgcaactcctgaatagccttataggtgctcgactggtccaaacgaggttccggagtatccaggaacaatgcttttcctgaaaaatatctggcctgttccgtatagaccccacgcggataagtattataataagtggtgaaataatgcgaagctgtgatgaagtcaccctgattatagtaggtcatacccaacatataaagtgattcctcagccttatccgttcccttcatgatggtaatcaattcctccagaatggtggccgccttagtattctgccctttgccaaagtaacttttggccgcttcgtacttgtattcgtagtccgtgctttttaaaactttgttatactctccacaagacgttagaaccgtaccggagacaagagctataatgatatattttttcatcttattcaaataattgcgcaaatttacgcctttccaccgaataatgcaatatttccatgtttttaaatgctaaaaagtcgacaagagtctattttttagagatgaatagataatatctaaggaaataactgtatttttacatctcattaaaccaaacatgctattatgaattttgaattgatttccgaataccaacccaccggcgaccaaccggaagctatcgcccagctgaccgaaggggtgctggaaggagtccccgcacaaactttattgggggtcaccgggtccggcaagactttcacgattgcaaatgtaattaaaaacatcaataagcccaccttgatattaagccataacaaaacattggcagcccagttatacggagagttcaagagtttctttcccaataatgctgtggaatactatgtatcttattatgactattaccagccggaagcatacttgccgtccagcgacacctatatagaaaaggatctggccattaatgaagagattgacaaattgcggctggctgccacctctgccctgctgtcgggacggaaggacgtggtggtggtgtcttccgtgtcctgcatctacggtatggggaacccgtcggatttctataataacgtaatcgagataaaaaaaggcaaactgctggacaggaatgtatttttacgccgcttggtggacagcctgtatgtgcgtaacgacatagaactgaaccgcggaaacttccgcgtaaaaggtgacacggtagacatttacctggcatatagcgacaatctcctccgggttatgttttgggacgatgaaattgatgccattgaagagatagaccctatttcgggaatccgtctggcaacttttgatgaatacaaaatttatccggccaatctttttatgaccaccaaagagagccagttgagagctattcatcagattgaggacgacttgacgaaagaggtggccaaattcgaggaggaaggaaaaatgtatgaggcgaaacgactctatgagcgcgtgacatacgatatggagatgattcgcgaactggggcattgttcgggcatagaaaattattcccgctactttgacgggcgtaatgcaggtacccgtccttactgtctgctggacttctttccggatgatttcctgattgtaatagacgaaagccatgtcagcgtaccgcaaatacgtgccatgtatggtggtgaccgggccagaaaaaccaatttggtggaatatggtttccggatggagtcggcttttgacaaccgtcctctaaaatttgaagagttcaaggaactggccaaacaagtgatttatgtcagtgccacacctgccgattatgaattggtggaaagtgaaggcattatcgttgaacaggttatccgtcctaccggattgctggacccggtaattgaagtacgccccagtctgaatcagattgacgacctgatggaagagatacagcaacgcatcgagaaagaagaacgtgtactggtgaccacgcttaccaaacgcatggcagaagaattgaccgaatatctgctgcgcaatgacatccgctgcaactacatccacagcgatgtggacactttggaacgcgtcaagattatggatgaattacgtcagggcgtttatgatgtactggtgggtgtgaatttgcttcgtgaaggtctggacttgcccgaagtgtctttggtcgccattctggatgcagacaaagaagggttcctccgctcccaccgttcgctgacccagacagcaggacgcgccgcccgcaatatcaatggaaaagtaatcatgtatgcagaccgcatgacggacagcatgaaaaaaacgatagacgaaaccaaccgccgtcgtgaaaaacagctggcatataacgaagagcatggaatcacccccaaacagatacagcgtgcgcggaatgctgccttgttgggcaacaacagcaacgaagttaccggaaccactcaaggccccaaggcatacatcgagccatcttccgatacaacggctgccgacccgattgttcagtatatgaccaagccacagatggagaaaacgatagaacgtacccggaaactgatgcaggaagctgccaagaagctggaatttatagaagctgcacaatacagggatgagctgctgaaactggaagatatgatgaaagagaggtggggatagacttgcccccttggcggaagaaggcgcactgcctgtcgaggaaaagcctgttacccgaagaaatatcacggatatgccggtgagttccggaataaaggcagggatggaaaaggaaaagacaagaaggacaaacagcaaaaaagcagggagtgtccccctgcttttttcagaaccgtaccattaattccatcacaaacttgtcttgttcggactcttttgccaaagatagtttatcatagaaatatttctcgtaattaagacgcaaatccgcttgaaaagcctttccaaagcttaatgtcacacctccagtcacacgctggcgggaataatcggtaatgtaaagcttaccatcctcatccgcattaccgttactatgatctcccatactgtcataacgtcctagaaatgaaattttccggaacaggcctttcttgataaacaagtcgtaattgacaaaggcgttgaaagcatgtacatcatcaaatgagtttttcgcataagttttataaaggtattcggcttctatatgccaattatcaaactcgtagtaagtaccgatatcatacatataaatgctgattttatcgggatgtattttctgggtactcaaagtcaagttataatttttccacggcatcaattgaagcttaacagaataattcaacgtgttgtgccactctttctgattggtgagtccggagccgttgaacagtccgccttccagtttcaacggcagtccctcctttaaagagaaagctccggtagcacccacatcacgcacattccccacctgtttggctatgaacgaacgattagcaaaatattgttggtggggagatcgatgagcgtctatggtgaaaggcacacgcatctgtcctagtgtgacattccatgtatcattgggaacaaagcgggcatatgcatccagcatcttgatgcttccctcatcggacaagtctatttcagccttataagcaattaccggaagaaccttcccgtccagactgacacgggcgttacgtacctggaaccgttgcattccgttagtggtttgaagttcatatttaccgcggatcgttccatgtacttccggcagatattctttaggaatagtcagctgtgcggaagcagttgcaatactcagcattgtaaaagcagacgctacaagtgtatttctcatttttattaatgtgactttctttgtttacggctgcaaagatataggttcggtatatctgtaatatttcatccatattacaaatatgtttcatttgatatggggaagacattttacagccacattccgtattcttctcatctgctgtgaacgcagtgaatatggccccaaaaatatcgacgtaccgacagagttattcaataatacgggcagtttccaccttctccagacgtgcacggagttttcccatcatggatttacgtatccggagcctcatcaggcaatccatatcatatgattgctccaagatggcaggctcgtcttctttcacaatgcgcatgatatcattcataaaaggatattcaaaggatacggtgatttcttcatccactgttctttccactatatcagcagcagctattgcttcggcagcggcggccttgtaagcgacaatcagtccgctggttcccaattttatacctccaaagtaacggaccactataataaggatatccgtcagctcattggaatttatttgccccaaaataggctttcctgcagtacccgaaggctctccgttatcatttgccctgaaatccttcctttcatgccccagcatataagcgtaacacacatggcgggcatcgtaatatttcttctgatacgtgtcaagatgctgctttatttcctctatggtacgtaccggaatggcaatagctataaatttactccgtttctccgtatatatgccttcggcaatgtctgtaatggttttataagtatcttcttgtatcatgggtttcagaaatcataaatctttaattataactcacagaatctgtctggcaatccatgcacacgcctcagcatcagccagcgcatgatggtgattctccaattcaaaaccaaaaaaaccggccaccgtatgtaactggtggtttctcaaccctttcagcttccgggaagcctgataggtacaataaaagtcataatcaggataatccatacaataagtacggaacacggctttcaaacacccctcatcaaaggctttgttatgcgcaaccagcggaagcccctctattttaggggcaacctgcttccatacttccgaaaaaacaggagcatgggcagtatcttcctgtgtcaatccatgaatacgggtgttccaatacaaatagtaatccggttcgggatgaacgaggctgtagaaccggtcggctatctcaccatttctcacaataaccacccctacactacatatgctggtacgttcattatttgccgtctcgaagtctattgctgcaaaattatccatactttttttcgttacacagacaaaggtacgacaaaaaagcgatatacaaaattcttttttccggtacaattccctatctttgaaacctcagcagcaaaatagaccaatatctatgacaatcagcacttgtgaaagctgaaagattagaccatctttgcactgtttttgttttttaacttaaactagatttatagtaaaatgaaaaaaatgaaattcccgaccctgttaatagcagcagggttactttgtatctccgttcacacaacggcccaacctgggccccgaaaaaaagtgggcgttgttctcagcggcggaggagccaaaggaatggcacatataggtgctttgaaagttatagaagaagcgggtatccctatagattacgtggtagggaccagtatgggctccattataggcggactttattccatcggttatactcccgaacagatggatagcatggttcgccggcaggattggtcctttctgctgagtgacaaaataccacgcagcgaacagaatatggcggaacgggaggcttccgaaaaatatgtattttccctgccattcggtaaaaatgccaaaacgcaagccgtaggaggattgataaagggacagaacctggcaaacctgttcagtgagctgaccgtaggatatcatgattccatcgatttcaacaagttacctattcccttcgcctgtgtttccgaaaatattgtaaatggcaacgaggtaaattttcacaaaggtgtattggctacggccatgcgggccagtatggccataccgggagtattcactccggtccggctggacagtatggttctagtggatggaggtgtggtaaacaactaccctgtaaatgtagcgcgtgccatgggggcggacattattataggagtggatgttcaaaatgacttgaaacccgccaacgaactgaatagcaccggcagtatcttggggcaactcatcaatttaatgggactggaactttataaaaagaatctgaaagaaaccgatacatatataaaggtggatgtggaggggtattctgccgccagtttcacccccagtgcggtggacacactgattcgtcggggagaagaagcggcattggcacaaaaaaactccttgataaagctgaagcaggaactggggctggacagtacctatatgccgaaaccccttcccagctatccgtactcccccaaccgcaaagtgtatataaaagaaatcacctttgacggattggacgaaaaagacaaacggtggctgttgaagcgctgtgatttgaaagaagactccgaaataagccttcgccgcatagaagaagcaacagccatactatgctccaatctggaatattccagcgccacttacaatctgcccgaagcccccggcggaggttataacctgcattttcttttaagcaagaaatatgagaataagctgaacgtaggaatccgttttgattcggaagaaacagccagtctgctcattaatgtcaccagcaatttccggggaaaagtacccactacgctgtcactgacaggacgattgggcaaacgttatgccgcccgcatagattatggattcgaaccggctccattgaagaacatcggactggcatatatgttccagtacaatgatataaacttttaccatcatggagataaatcacataactctacctaccgctatcatttgggagagttatccttttcggatgtttggtacaaaaacatacgctttgccgtggggctgaggtatgaattatatgactatgacaaattcctataccaggaagggaaccaaggttttgacgtaggaacagaacacttcttcagctatttcgcacaaatgcattacgaaactttcgacaaggcatatttccctaccaaaggcatatcagcacgagcgtcctattcactttatacggataatttcaccaaatatgacgaccacgctcctttctctgccataaaaggctattgccagggagtgattcccgttacacgcagattctccatactgcctgccatatacggacgttttctgatagggaaagatattccttactccaaactcaatgcgatggggggggatgtgcaaggacgtttcctgcaacagcaactaccatttgtcgggataaacaatgtggaattaacaaagaatgcgttactgataggaagcatgaaattccgccaacggatgggaagtgtgcattatctgacgttaacgggcaattatgcgctgagtgcaagcaagctgaggtacctgttggaacaggataccatgttcggctgtggtataggctacggtttggatagtatgttcggccccttagaggcatcactaaactatgcaaaccgagccaataaagtgagtatgtacgtcaatctaggatttaagttttgattcctcgttgataaccgccatcatgccttctatctgagccaaggccatcatacggccatgaaacgaataccccgggttgtatcctttgccggcatcatccagcatcatgcgcccatgatccacacgcatcgggacacccggacgttctttctcaaaaatacggatcaactctatcacatgagcacgccctcccaaatgagatgcttctataaaattcccgttgggaaacgcattggtactgcgcaaatgtacaaaatgagtgcggtgtgcaaacatacgtgccaacaaaggtacgttgttatgcaatccggcgctgagcgaaccggcacagaatgtcagcccgttatgcgggttatcaaccgcatggagaagccagttgatatcttcctcaccggtcacaatacgcggcaagcccaatacctggaaagggggatcgtccggatggatgcacatatttataccgtactcatcacacaccggcatgacagcctgcaagaaataacgtaagttttcacgcagggcatcacggtctatcccatcatacaaagacaaaagacggcggaatatggttaccggatgccggtctccctcctttatattaccatttacaaatccctgcgtcttgactataatggtatcgaccaattcgtttttctcggcttcggttatagtcttatccaattcacgcacctgttgtaattccaaatcggtatagtctttctccgccccttcacgctgaagaatcatacagtcaaaataggcgaaccggatcttgtcaaagtacaaagaactggttccgtcctcccaaggatgttccaaatcggtacgtatccaatcaatgacaggcatgaagttatagcatacggtcttgatacccgctttacctaggttggcaaggcttactttgtagttttctatcaattgatcccgttcaggaccggcatatttgatagcttcacttaccggcaggctttctaccaccgaccagcgcaattgatgagattcaatataatcttttaaactttggatagcttccaaagcccagatttcaccgttaggtacatcgtgaagggcggtcacgattccttccaccccgatttgcctaagcatggtaagcgttatcttatctttcttcccaaaccatctccatgtcttttccattcgtattatgtgttttagtctgtatgacaaagtctttattaatcctctttgagccttctattgatgtataatcatggcagaacgtgccggtaccataagctcatcacctgaaacctgtcccaagcctttcatgtttattttaccatccttacagattacagtgtatttacccgacggaatgtccagcttgacaggctctgcacggctgttcaaagccacgatgatatttttccatgagtcaccatttgcattgtctttcaagataaaggcaaccacattcgtattttctacaggtaaaaactccaattgcctacgtaccatatcggcatcccccatacgaaaagcgggatgtgctttacgcatagctattaaacctttcacatattcgaacacatctttgtgtgcggtcttatttttccaatctatcgtattaatactgtcaggactattataagaattatgaactcctttcttgtcacgcatcatctcatcccctgcaaatataaacggtactccttgtgaagtaaagacaaatgtttccgctaacttctgcaaagccgccagttcctctaccgaagcatccggcatggtagctttcagacggtcggcaagacacatgtcatcgtggcaacttacataacttatcatctgggtaggttgtaaagcccaaggtttcttactataattcacagaatcacttataacctgcggatgttcgatggctcccacaattccaaatttgatactcatttcgtgtccaggctcccctactagaaaagctcctttagtatcatcatcccaaccacctcgcaatccatcacgcatttcatctgagaaagcggcgatacggggcatcttttccacattggctttcatcgccagcctgtctgcctctaattgaggagaactggcagcccatccttcaccatacataaaaatagacggatctatcttatcaatagccgcacgtatctcattcatggtttcaatatcatgtatccccatcaagtcaaaacgaaagccgtctatgtgatattcattaatccaatatagaatagattctatcatatatttacgcatcatggcgcggtcgcttgccgtttcatttccacatcccgaaccatttgcccattgcccgtccttcgtctggcgatagaaataaccgggaaccgtacgttcgaaattgctttcgtctgtattgaaagtgtgattatacaccacatcaagcaccactctgattcccgccttatgtaaagcttgtaccatttgtttgaattccctgatacggacatcgggtttataaggatctgtagaataagaaccgtcaggcacattgtaattttgcggatcatacccccaattatattgggccttgtccagttttgtttcatccaccgaggcataatcatacgacggcaataagtgcacgtgggtaattcccaattctttcagatggtcaatacctgtcttctcgcctgaagaactggtagtaccctgctccgtcaaagccaggaacttgcctttattttgaattccggaaacagaatccaaagagaaatcgcgatgatgcatctcataaaccgtaatatcagcataattcttcaaaggaggacgcacatcgttctcccatccttccggatctgtagaacgaagatcaagcacagctgcccgcttaccatttacccctacggcttttgccataattcccggagtgtctcctaaccatttcccgtttaccttcacattaaaggtatagaatttacccttcaggtcctcttttattgaaatattccaagtaccattctctcccatctccattggaaaagtattagaagctgaaccttcattacccgattcaaataaaaggacacgcacctcttccgctgtaggagcccaaagtgaaaacttggtttcggcaggcgagtactccatttcagtcagcgcatcttcacggacaggatattcatcaaacgaattatattcttttttcacagactgacaactaatagtagtagaaacaattgatgcccaaataacatgtctcacattcataatcttatctttttattttatcaggattcttatttataaaatctttccagccggaatattctttagtcaatgtcggtctgcccatttgtaaataatgacaataagcagccgccaacccatctgttgcatccataaaaggcagcatatcactctccggtatatgtaacatccttttcaacatatcagcgacctgttccttgctggcttgcccattaccggttatcgccatctttatcttcaacggcgcatattctgttataggaatatcacggctcaaagcagcagccatagccactccctgtgccctccctaattttaacatcgactgcacattttttccaaaaaaaggcgcctcaatagctaactcatcaggtaaataagcttctattataccaaccacccgttcaaaaatacggcgcagttttaaataatggtcaccatatttacgaagatcaatgacccccatagtcattacctgcggtttagtacctactactttcagcaggccataccccattatggttgttccaggatctatacccagaatgattttctcttttaccggctgaatcacttaatcacctccatcaaagtgggaaagccaaccaccttatctttaaatatcttcatcatttcctcattcagatgcatcccttgctgagtatgccaacgatgcaaggccgctgtatcttccacctcccattgcaatgaaaaacattctgaatcctgctctttgtgactaaggatgtgcgtaagacggggattttgcaatattcccgtcttttccacttcgggtatatagctttcactaagccaaatgacaaaattacgcgcatcgtcaatgcctgtttgataagttgtattataaattaacatatctatagtctttaaattaaaaaaggcctgcttcgcagaccttcattttatcattaaaaaagtggagcatgcgagactcgaactcgccacctttagactgccagtctaacgctctagccagatgagctaataccccgagaaataataacgatgcaaagatacatagaaaatcaataatacaaagcttttgggaaagttttttttcatgtgaacaaaaaatttatttgccacttttactccaaagagttactgttgcgtgaaattgttaaccaatagctgaccaagtttaatagcataacaagcggataaccccgatttgtgacaagtcggagctatctaaatcataagttaaaagttattatgaaaaatcattgttgtatcaatactataccccatcggcataataacagtcacaatagttacacgaacaccaaagggatccccacagaaagcttcattgggaatacggtgtatttagctatgaataacaactatatgtcaagaatggataggatcggaaaaaagtcatactgaagcatcttagtaaaagaacaatcatcgtcctatcaagtgctacccggcattatctatatcagtccggcaaaagcatgaaaggagaaatataccgaatatcctagaagagaaagaaatattcatgtccgccaataacaaatccaccacaaatacaaccaagggttgctgctattaacggctacgtaccatttcaattacagcactgtatttcacaactctatgattggcaaggcaaaaaaagatgtaaaaattgcattaaacctcccctatcggcttggaccaaacttcctctttcgtttctttacacattacggaaatagttcctccaacaaaatccttcacatatcctttgcgttcagccaacatatcttccgccattctaatggccttagccttatctttcaatgaaaatcctttattagcaaaatcattaccttctttaaaatatatatcataagtttccattgtatcacctttttaaatttgagtggcaaagataaaacctacaattattatgcacaagagatttcttaattatttttcgaatatcgtcaagaaacaatttaactaaaaaaattcccgacttatcacaagccgggaattcatgtaaaagcactattataaatatactaactattgcaaaattttaccatcttcacctaagaacaatgtctgttcatgagcatcacttgtcaacacattaattttataaatacggcttccatcaatgccataggccataaaagcctgctttatcatagcaccttccaatgcaagcctgtccatcacggcttccggcacatcattcatatagatttccgagaaaaccaacttcttagattgttgaggcttttccactaccggaacctctaccggagccgcttgagcaaaagaaacagacacgcctaaagtcatcactaataccaatgttactaatacctttttcataattactttattttttatttatttttaccgacaacaataaaacaagaagcgcgccacaaatctgctcattttaatatctaactaaaaatcagctacatacatatacattttttcatttcaggagtgtagattcctgttgacaacaccacaaaagtgtggaaaaaatccacaaaatcaggttttataccggcgaacaaaaagtatagccaagctgttttatcaacctcatcaaaacatttaaataccatgaagaagagatgttattctatatgtgtaatattatgggtactgatcaccaccttgtctgctacctctcccactacatttcatatagcactgaaaaagatatatccacatgccacgaacgtaagctggagccaacaagggaattattatgtggcctcttttatccaaaatggttttgaaaaagaagtatggatgaacggtaatgcccaatgggtaatgactaataccgatttacaaactacagatcaactgacacctaacgtatataatgattttacattgagtccatacgccatgtggactgccaccaatgtaaatctcatagaatttcctaaacgaaccactctgtacgtaattactgttaacctaaacaattcgtcggccaccaaacaattattctacacactgaatggcaggttatggcaaacacgtgacgtcagttatatcaatcctacattatcccccggaatctttgaattctaatactattatgactgaacaaataacatttccggaaaagggacatatcaacaattggcaaacgattataaactagcattttaaagtaaaataataaaagaatctacattttcagggcgttaaattaatgtaaaaaactgtttcatttcccatcccccttacctcattttactacttttgcgcacactcagcctataaatgtgcaaaagttatcatggaactagaacagagttttattgctcttatcgagcaaagtataaaaacaaattggtatttaaacgctcttacagactataaaggcatcacattacaatacagagatgtggcccgtaaaatagagaaaatacatatcttgctggaaaatgccggcattgagaagggagataaaatagccatctgcgggcgtaatagcgctcattggacagtaacttaccttgccgtcatcacctatggtgccgtagtagtacctatcctacatgaattcaaagccgatcaggtacacaatattgtaaaccactctgaagcccgcctgttgttcgtaggcgatcagatatgggagaacttgaatgaagcagccatgcctcatttggaaggtatcatagaattgaaagatttcggtgtacccgtatcccgttcggaaaaactggcttatgcccgcgaccatctgaatgagatattcgggcacaaattcccttgcagatttcgtcccgatgatatttcttatgaaaaagaaaaatcagaagacctggccatcattaattacacttcaggtactaccggatattccaaaggcgtaatgctgccttatcgtagcatactctccaacgtgctctactgtaaagaaaaaataggtctgaaagcaggtgacagcgtcgtatccatgttacctttgggacacgtattcggcatgactttcgattttctttacggtttcacagcaggcgcccatctatggtttcttacccgcatgccatcgcccaaaatcatagccgaatcatttgcggaaatccgcccgcgcgtcatagcttgcgtgccactgattgtggaaaaaatattcaagaaaaatattcttcccaaggtagacaacaaattaggtaaactgctattacatgttcccatcatcagcgataagataaaagaacttatcaagcagaaggcgatggaagttttcggcggaaatttcatcgaaatcatcatcggaggggctcctttcaatgccgaagtggaagcctttctaaaaatgatagatttcccatacaccattgcatacggaatgactgaatgtggtcccatcatctgccatagtcattggacagaactgaaactggcatcttgcggaaaagttgccgcacgtatggaagccaaggtactgtctcctaacccatcagccattgcgggtgaactggtatgccgtggagccaacctgatgttgggctattataagaacgaggaagcgacacggcaagtcattgatactgaaggatggttgcatacaggcgatatggcgacaatagacgaagacggaaatgtttttatcaaaggacgttgcaaaaacctgttactcacttcttccggacaaaacatttatccggaagaaatagagtccaagctaaacaatatgccatacgtgtcagagtcactgattattctgcaacaagacaaactggtgggcctaatctatccggattccgatgatgcttttgctcacggcttgagccaatcagaccttgtacgggtaatggaagaaaaccgccttgaactgaacaaacaattaccggcattttcccaaatagcccgcttcaagctatatcctgaggaatttgaaaaaacagccaaaaaaagtatcaagcgcttcttgtaccaagatataaaagaataaatcaaaaaaagctctcttcataatatgaagatgtatcaaaagtaaaatggcgtatcattttgccagtaggggcaaggttcgctcgcccaaaaatagtttgcttatgcatttgggcaggcaaaccctgcccctacagttgacaagggatattcagtaaatgtctctaaaaaataagatggcatatgaagatgatagggcatgaccatttcatatgccattcttattgtcatttttccgtgctttctcacatacttctatccgacaggacatgacgttccggaagaagtctgatgacctcttctgattctgtgagtaaaatcatatcatgctgctttagctgttttgtttctgattttttctatcatcagtatggcatttgccgtatgtattccaaagaaaatccacagtatttccgtcttcctgtttctggcctttatccttgagagcgagtaatgttgcttttgagtgccgaagcttccttcaagccgtgttgccctttcttttgagagttcgcttctaagcaccttcctcaaaggctcatctttggccgcccttcccttgcgcacaaaggatgtggatatcccatattttgtacagaactttctgttggcattattggcatatatggaatcggcagccacacatcttacccttacattcataagcttctgctgcatacggatacagtccttcaagcgtataccctcattgaatgccttgaacgagaggtgttcgatgaacgatatgccgtctatctgtatattattgacctttgcaccgaactcgacggacttggtttccttgcctctgacgatgggacgtacataatgacggtcaatgctgacgatgcggtcactgactttccgcccttcaaacatttccttttcttgtacaagcacctttctgatgatggaaagacgcttatgataatcctgggtatatcggagtaaagcaccgtactcgctatggatcccatccctttgactgaggagcttttcaagaagcttgatcatacggcgcttaagcattcttgtccttgaagctctcctctttcttttcttgcagtaggacagataggattccgccacattcctgtatttgttgcgcggacgccttatgcccagctccctgcaatgccggcatatatgcctgtagagccattcgaggctttcccaaaggagtttcatgtccgtaggaaaacgcatgtggctttcatagcatgtggcatcggtcatgcagacgtgaaggttatcaagataaggtttccagtgtgaagccaggagctcctggaaagaatcaatgtcaaggcgggatgctatctcattacggatggcactgactatcttgaagttggttatgggaagggacgggggaatcataattccacagaaaatctggtagtgtatgttcccgttcagatgttccaccagttgcctgtcggagaatccggtgtatgccttcaggaccataagggcgatctttgcggaaggactgaatctgttcctgcgtcccaggcgccggtccgacaggccggcggcttttgccatacattcaaaaggaaagaccgaatgaagcttgccaagctcactctcattaaaactcttgcggtatttttccagaatatcaaattctgtaaaacccaaagtagggtgaatttctgaaatattcactatctttgccatatcttattagtttggatatttcccccgttttggccgtcaaatcttattttcgggggaatacctaaagatacaaaaaagccaactaattcgcaatactttgtgtatgaattagttggctgattttgtaatatttaatgaatgtccctgacaacatgataacacaatcggacttttaatccccccgccccgtatgtataaagccacacatacggtataactacaaaagttcagataattcgttctgcaaacgtcctgccacttcttccataggcacttcgcaccccaattctttctgtaatgaagtaacccctttatccatgaatccgcaaggatggatataactgaaatagcgcaaatccgtatttacattcagcgccaatccatgcattgtcacaaaatgactgcttctcactcctattgcacaaattttccgttcctgcggagttcccgcggccagccatactccggtcgctcccttcactcgcccggcctcaatgccataagatgcgcagaccctgatcaccgcttcttccaacacataaatatattccttcaaccccaaatgataatcctccaaattcaagataggataacaaaccaattgtccgggaccatgataagtaatatcccctcctcgatcaatatgataaagagtggcaccaatcatcttcaattgtgcctcccccagcagcatattcgtttcctttccactcttgcctaatgtatagacatgcggatgttctacaaaaataattctattctcatacgtttttcccacttgtttagcttccaccacggcattaaacaactccgtctgccgtttccaagcctcagaatagggaactaatccccaattttcaattttcatgatacctctcagttttaaatgtaaaataggatagggttcgcccgatgcgtcttttgcatccctgccaataacccgaaatccaaaatggccataaaagccggacgctttcttattttgttcgtttacatcgacataacgtacatggcaatgctccaaagcataacgcatcaattgtttccctattcccgtacctatggcacgcggatgaacaaaaagcatttcaagcatagtcccattaatccccatgaatccttctataccagcattgtcacgaatcatgtaaagcggcatactatgaagataaacactccataccagtggctttaacttctgaatatatgcttcaggtatgaaatgatgagtagcacgcaccgaagcttcccataaacaggtcaattcatcaaagtcatcggacgtaggtttaattatttgatacatattacttttttctgcaaaggtgggataattattgtatatttgcaaccccaatcaaaagaaagaatatgttgccgtacatcaatgattttccaatagaattccgcgactatatcgcaagtgaaattatcccacgatacgctggttttgacaaagcacatcgtgtagatcatgtattgaaagttatagcagaaagcctcaatttgtctcaatattatgatgtgagccgcatgatggtgtatgttattgcctcttaccatgacctgggactctgtgagggacgggagttccaccatctcatttcaggaaaaatactatgggcagaccagaagttaaggcaatggttccctgaagaacatattttgattatgaaagaggctgtagaagatcaccgtgcatccaacaagcatgttccccgtagcatttatggcaaaattgtagcggaggccgaccgcattattgatccggacatcaccttgagacggacggtacaatatggtctttccaactatcccgagctggacaaagaaaaacaatacatacgttttctgacacatttgaaagaaaaatatgctgaaggtggttatttaagattatggatacctcaatcagccaatgctgcacatctgcaggagttgaggcaactgatagccgatgaggaagaacttcataaagtatttgaaaagatctattcacaggaaacagaaacgatacagaatttagaaaatatccctatatttgtccggaacaaaaaaaataacagtatatgaaaaagctggttctatccatttctatgtttctgattgccgctactacctttgcgcagtccgaagtggtaacagatagtattccgcccatttcattggatggttacaagaattttaacggatttatgctggatatgggttccatgattatggcccctccccctctgatagccccgcaactttattatcagccttacaacaataatgcaattgcgaattacaatgaaatattccgtcccaatatgaatatcatttatgacagagggtcttacaaccatgtatttacccccatgtatccgggaatgggaatctatggattcggaacaatgtcaatgcctcccaccttacaaagtgcaacctttaaattgaaaaacggattacacatcaccacatacggtgaatatgatgccgacgggaacaaagtacggaatccaagcgcattgccttgggaaagaaataatttcaacggagctttcgaaatgaaatcggagaatgggaacttcggaatacgaatagaagtacaaagaggaagaaacaatcctttttgaattataaactaaaagatagaaaaatgaaaagcagccatgcaaaacaaaatctatgcacggctgcttttttatttatttttaattcaatcacaactttctccaattcaggctcaagctgttcaacactacactgacagaactacatgccatggcagcactggcaatcatcgggttaagcaagataccatacaatgggaacagaatacctgccgccaccggaatgcctatcaaattatagataaacgcccagaaaagattctgatggatcaaacgtacagttttatgggaaagtttaaaagctttgggtaacaacaacaaatccgaagtcattaacgtaaccatcgctacatccatggcaatatccgtacctttacccattgcaatacttacatcggcacgtgccaacgcctgtgagtcattaatgccgtcacctaccatagctacgactcttccttcagcttgtaattctttaataacattctccttatcgaccggcaaagcatccgaaataaaacgattcgcatcaatttctccggccacattctgtgcagtaagatgaccgtcaccagtcaacaatacaatgtactttccactctccttcaattgtttgaccgcttgtctggaagtatcttttattttgtcactaatggctataaccgccagcaatgtatttccctcgccaaaataaaccagactcttgccactcttctcataatcctccaccatccctttcaacaagtcggaaattcccgctccaaaatctttcagtaaccgatggcttcctgcccaaaaagttttatttccacgggtcaccacaatcccccgtcctgtccgactctcaaaagaatcaatgagtgccggcttctcaccttcctttttcaaagcctcgacaatagccaaagccaacggatgttccgatttcaattcagcagcatacagaattcccttatgctcgttctgccatccggcatcatgcaaccatccggtcaccacagggcgcccctcagttacagtacccgttttatcaagtaccactgtatccactttccgcatctgctccaaggctaccgcatcctttatcaaaatatgtgattcggcccctctaccaattcctaccatcaatgcagtgggagtagcaagtcccaaagcacacggacaggcaataaccaaaacagacactgctgaaagcatagcataagaaaagtcatccgctccacctgccactatccaaacaaggaaagtaaaaacagccacagcaaggacaacaggaacaaaaaccgccgtcactttatccacaatacgctggaccggagctttagacccctgtgcttcctgcaccatgcggataatctgtgccaacaccgtatttttccccaccttttgagcagtcatagtaaatgcaccgttctgattgatagtgccggccagcaccttatcaccctgttttttctctacaggaataggttcaccgcttatcatgctctcatctataaaggtgtttcctccgacaatgactccatccaccggaatttgctcaccgggacggacgctcaccttatcgccaacctgaagttcggctatcaagatatcctcttccctgccgtctttcaccacacgggccgtccgaggctgtaatcccatcagtttacgaatagctgtggaagtttttccttttgctttctcttccatcagcttgccaaccaatacgaaagctattataacagtggcagcttcataatatacatgaggttccaatccgcggctgtaccaaaattcgggatagaacgtattaaacaaactgaacaaaaatgcgatggaggtactaagtgccaccaacgtatccatattactggtacgctgaagcgtctgtttccaggcattcatatagaaagaacgccccgaatataaaataacaggaagtgaaagcaacagcatccaccagtttacccccggaacattcatcagaaacatccccaaaacagctaccggtaaagcaaaaatccaagcaacgatagtcttccgcttcaactgtccgtaataagattgctctgcttcctcctgctcctgcacagagttatcctcatctattatcaaatcaaaacctattttcatcacagcctctttcagttgttgcggagacacaatatccggattataagtcaccgccaaagtagccgccgccaaattgaccgatgcattttccacgccttcttgcttccttacaatcttctccacgttgccggcacatgccgcacaatgcattcccgtaacgggatatagtttttttgtcatatcgctcatattcatttctttacttatttattatagcttatcaacggacaaatttagcaaaaagttcatgcaatcttgttgcaaacagataaatatattttcgctttttagatggacatttcacgaagttattctatatttgtggagaaagttaggataagtaatccatgcaaataaacaaaaagttatgaaaaaaagaaatctcgtattgtctgttatgacaacttgccttgtatcctgctttttattatcgggatgtaacggacaaaaacaaattgatagtgaaactgtaaagactgtaaaggtggaagaacaagcccatttacaagatgacacagtctctcccgcctgtaagattactattgattatagttatttagcagaatctgatgctgcggatagcatagcacaacgcatcaaccgtaccatacaagcccacgttttgggaaaagaatatatccggatgaatccggaagttgctgtagattcttttaaaaatacctacattaacaactaccgcaaagatgtgaacgagttctatcaggaagatataaaaaatggaactcccaaagacgaacttcccacatggtacaattatgaatacggactgaccacccatttcagcgaaggcaaagaaggtattctgaatttcattgcagaaacttttgaatatacaggcggggcacatcccaactcatggaacaaatggatgaacttcgaaaagaataccggcaaactgcttgctttgaaagatgtatttatggcaggatcggaaaaaccgatgagcgacatgttgctggaagaactgataacagagatggctacccgtctggaagacagctccatcacctcactggaaggacttcagaatgcaggcatcttgaattctaccaatatgtacgtacccgacaatttcttgttagaaaaggaaaaagtatctttcctgtataacaaatatgatatcgctccctatgctgtaggagtcatcaccctttctttgccctacacatcggtagaaaaatatatgatacattaaataacgattttaagtatagaatggaattaatactgaaatatttccctaacctcagcgaacagcagaaaacacagtttgccgcattgtatgatttatatacggattggaatagcaaaatcaatgtaatctcacgcaaggatatcactaatctgtacgaacatcatgtattgcactcgctaggcatagccaaagtgataaacttcacccctgatacccaaattatggacttgggcacagggggcggtttcccgggtatccctttggccatcttattccctgaagtccaattccatctggtggacagtatcggaaagaaagtgaaagtagctacagaaatagccaatgctatcggactgaagaatgtcactttccgtcattgccgcgccgaagaagaaaaaaggaaattcgacttcgtggtaagtcgtgctgtcatgcctttgggcgatctaataaaaattatccgtaaaaacatcagacaagaacagcataacgccctgcccaacgggctgatttgtctgaaaggcggagagttggaacaagaaacaatgcccgtgaagcacaaaacaatgctttatgatctgaaaaatgaattcacggaagatttttttaaaaccaagaaagtggtttatgtaaccatcagcggtttataattatagataaaaaaaacatgaaaataaagaaatttgaattcaatatgtttccggtaaactgctacgtgctatcggacgaaacaaaggaagccgtcattattgatgccggttgcttttatgaagaagaaaagcaagccttaaaaagatatattgacagcaatagcctgacagtgaaacatttgttgaatacgcacctccatctggaccatattttcggcaacccattcctgttgcaagaatacgggctaaaagccgaagcaaatcaagcggatgaattttggctggaacaagcaccggcacaatcacgtatgtttggtttccaattgcccgaagcacccgtgccattaggaaaatatatctttgatggagatatcattactttcggcaatacccaactggaagctatccatgtaccgggtcattcgccgggaagcattgttttttactgcaaagaagcccactgtatcttcagcggtgatgtattgttccaaggaagtataggacgtgcagaccttacaggaggtaacttcgacgaacttcgcgagcatatatgcagtcgtttgtttgtactcccccccgacacggtagtctatcccggtcatggagacccgaccactgtgggagcagaaaaagcgaacaacccttttttccgataagataaaacttaaaattcaacttatatactactaccatgaaaacagatttattagcagaccgacatatcggtatacaggaagaagaccttcccgttatgttggaaaagattggcgtaaagagccttgatgaactgattaacaaaacaattccgtccaaaatccgtttgaaagaacctctgccactggctgctcccatgacggaacgggagtttgcagagcatattaccgaactagcttcacaaaacaagatttatacctcttatataggtatgggttggtatgacagtattactccggcggtcattcaacgcaatgtattcgagaatcctgtgtggtacacctcgtacactccttatcaaaccgaagtttcacaaggacgtttggaagcactgatgaacttccagactgtcatatccgacctcacagccatgccattggcaaactgctcattgctggatgaatctaccgccgctgccgaagccgccaccatgatgtatggacttcgcacccgcgaccaacaaaaaagcggagccaacgtattgtttgtggatgaagagattttcccacagaatctggcagtcatccagacccgcgcccttccgcaaggcatgaagatccaagtaggaaattacaaggaattggcatttactccggaaatctttgcctgcatccttcaataccccaatgccagcggtagcgtggaagactatcgtgagtttatggaaaaggcacatgccgcccattgtaaagtagccgtggatgctgacatcatgagtttggcattgttagttcctcccggcgaatggggagcagacatcgtattcggaagtacccagcgcctgggtatccccttgttctacggaggtccgtccgcagcctacttcgctacacgtgacgaatataaacgcaatatgccgggacgtatcatcggctggtctaaagacaaatatggcaaactggcctaccgtatggctttacagacccgtgagcaacatattaaacgcgaaaaagcaacttccaacatctgcaccgcacaggcattactggctacaatggccggcttctatgccgtttatcatgggcaggaaggtatcaaaaatatagcaaaacgcattcatagcattaccacctggttgaacaaagccctaactcgcttgggatatgtacagcataatgaattattctttgacaccctgcgtttcagtctgcccgaccatgtttcggctcagaagctgcgtaccatcgcattgagtaaagaagtaaacctccgttactatgataatggcgatgtaggtttcagcattgatgaaaccaccgacctgaaagatgtaaacctgttactttccatcttctccattgctgccgaagaaaccgttcaagaaataacagacattcccgaagcatcctcactgaatcgtgagctacgccgccgtacttccttcctcacccatgaggtattcaacaagtatcatactgaaaccgaaatgatgcgttatatcaaacgtttggaacgtaaagatatctcattggcacattccatgatttcattgggttcttgtaccatgaaactgaatgccgcttcggaaatgctcccactcagcaacttaggctggatggctatacacccgttagcacctgaggatcaaacaaaaggctatcagacattaattaataacttaagcgagcagttgaaggttattaccggatttgcaggagtcactttgcaacctaattcaggtgcagcaggagagtatacaggacttcgtatcatccgcgcttatctggaaagtatcggacagggacaccgcaacaagatattaattccggcatcagcccacggtacgaatccggcttcagccattcaatgcggatataccacggtgacttgcgcctgtgacgataaaggtaatgtagacgtagaagatttacgtgcaaaagcagaagccaacaaggatgatctggctgcattaatgattacctatccgtccactcatggtatctttgaaccggaaattgcagaaatttgtaaaattattcataaatgcggagcacaggtttacatggatggtgcaaatatgaatgcacaggtaggtctgaccaatccgggtaccatcggtgctgatgtatgccatttgaatctgcataagacttttgccagccctcacggtggtggcggtccaggtgtaggtcccgtttgtgtagccgaacatctggttccgttccttccgggacatcaagtttggggtaacagtgccaatcaggtttcttcagctccatacggtagcgcaggaatcctgcctattacttacggttatatttgcatgatgggcgccgaaggtctgaccaatgccaccaagactgctattctgagcgccaattatctggcagcctgcttcaaggatacctacggcattgtatataccggcgctacgggctttgtgggccatgaaatgattttagattgccgctatctgcatgacgaaaccggtatcagcgaaaatgacatcgccaagcgtctgatggattatggctatcatgcacctaccctttccttcccggttcatggaacattgatgattgaaccgactgaaagtgaaagtttatgggaactggataatttcgtcactgtgatgcaaaccatctggcaggaaattcaagaagtgaagaatggcagtgccgataaagaagataatgtattggtcaacgccccgcatcctgaatatgaagtggtggccaatgaatggaatcacagctacagccgagagaaagccgcttatcctatcgaatcggtacgtgataacaaattctggatcaatgtagcccgggtagataatacattaggtgaccgcaaactgttgcctacccgttatggtaagtttgaataaaaaagcattgtactaagaagaagagaggatcaaaattcagtttttgaaaatatgaatttataatttgaaatttgaacatcctaaaaagggacattcattaaatattacaaaatcagccaactaattcatacacaaagtattgcgaattagttggcttttttgtatctttaggtattcccccgaaaataagatttgacggccaaaacgggggaaatatccaaactaataagatatggcaaagatagtgaatatttcagaaattcaccctactttgggttttacagaatttgatattctggaaaaataccgcaagagttttaatgagagtgagcttggcaagcttcattcggtctttccgtttgaatgtatggcaaaagccgccggcctgtcggaccggcgcctgggacgcaggaacagattcagtccttccgcaaagatcgcccttatggtcctgaaggcatacaccggattctccgacaggcaactggtggaacatctgaacgggaacatacactaccagattttctgtggaattatgattcccccgtcccttcccataaccaacttcaagatagtcagtgccatccgtaatgagatagcatcccgccttgacattgattctttccaggagctcctggcttcacactggaaaccttatcttgataaccttcacgtctgcatgaccgatgccacatgctatgaaagccacatgcgttttcctacggacatgaaactcctttgggaaagcctcgaatggctctacaggcatatatgccggcattgcagggagctgggcataaggcgtccgcgcaacaaatacaggaatgtggcggaatcctatctgtcctactgcaagaaaagaaagaggagagcttcaaggacaagaatgcttaagcgccgtatgatcaagcttcttgaaaagctcctcagtcaaagggatgggatccatagcgagtacggtcctttactccgatatacccaggattatcacaagcgtctttccatcatcagaaaggtgcttgtacaagaaaaggaaatgtttgaagggcggaaagtcagtgaccgcatcgtcagcattgaccgtcattatgtacgtcccatcgtcagaggcaaggaaaccaagtccgtcgagttcggtgcaaaggtcaataatatacagatagacggcatatcgttcatcgaacacctctcgttcaaggcattcaatgagggtatacgcttgaaggactgtatccgtatgcagcagaagcttatgaatgtaagggtaagatgtgtggctgccgattccatatatgccaataatgccaacagaaagttctgtacaaaatatgggatatccacatcctttgtgcgcaagggaagggcggccaaagatgagcctttgaggaaggtgcttagaagcgaactctcaaaagaaagggcaacacggcttgaaggaagcttcggcactcaaaagcaacattactcgctctcaaggataaaggccagaaacaggaagacggaaatactgtggattttctttggaatacatacggcaaatgccatactgatgatagaaaaaatcagaaacaaaacagctaaagcagcatgatatgattttactcacagaatcagaagaggtcatcagacttcttccggaacgtcatgtcctgtcggatagaagtatgtgagaaagcacggaaaaatgacaataagaatggcatatgaaatggtcatgccctatcatcttcatatgccatcttattttttagagacatttactgaatatccctaaaaaactaaagaaagggtcgtatcattactcaagacagagcttgatacgacccttttaagtttataattactatctgtaacttttcggaactgtcattttagttttaacacacctcctccctcttttcaggaactatccttttactttatccacagtaggagcaacttgagttccatagcagtccgaacacataatatcagtatcctaattcataaggctgttctacagccggaaccccatcggacatccatccaggcattgcttcttttttcagataatgattaaagaactggaacatacgtttttgaaaatctattttgttggcaatctttgtcggccaatgcggttcgcctgtatagttcagcatccagcaaggctttccaagacgtttcattgccacaaaatattctattccctgataccagggcacatgtccgtcagcgtcattatgcatgattaaaacaggtgtttgtaccttgtccatcgtgaacagagcagagttttccaagtaacgcaacggagtactccaaggcgtaccgcccagacggctctgagtatgttcatactggaacgagcgtgccagccccgatccccaacggatacctccgtaggcactgaacatattgaccaccggagcacctgactcaatagccgcaaacaaatcagtacgtgtagccagataagccacttgataaccgccccaactatgtccctgcgcccctatggctttctcgtcaatataacctttgcctatcaacatggcaacccccggcatcagacagttatagcaactctcacccggataaccgtctacataacgtatgtccggattgaacacaatatacccgttactgttataaagatgataatcaatggtagaccgatggggttccggcatccggtaattaaacagagtttccgaatttcgctcatagaaactcacaatcatcgggtatttcttggccggatcaaaatcggcaggcttgtacaccaccccttccaacttacggccatctaaagatatccacgaaaccagttcggcagttccccacaaatagtctttctgttggtcaatgccatgagtcagccgaatagatttcttgaaatcgagtgtagcataatgaaggtcaggatattgctcaaaactttccatcgtatagattacatggtctgtatttttcgccttagaaatactgcgtaacatatagttacccgccatcaattctttgggagaagcagcggtggaaagacgagccttgtaatacccgttccctttggtcacttcgttaaagcctttcaacaactgtggcttgttcaggtcaatcacacgctcctccttatccagttttaccaaacgatatgaaatccggttcttacgtccattcatcgtcagattgacaggttccttcatggcatccggatcgaatttccaaatatcataacggtcataaattaaaagggactcatcccgttccgtccatccggcagttccatgtgcgttcggatagtcaggtacatcattctcttcatcccatgcgaggaaagaagcgggggtagtcaactgattttttttcccgtctgccatagaaagagtataccaacaactgtctgtttcagcataccaatacgcatacttgccttgtggtgaaagacggtatctgccataatccgccgatgccagtaatttacggctgccatcttccaaagacactgtgtaataatcactgcgtgtccgcccttcccacatggaggacaatgaataaggacgcgaagtggaaagcaatgccaacggggcatctccttcatctcccagcaaaatctgagacagctcctcatctgccagctgacaaatacgaccaccatttatatgataaaccgcttgatagcttcttttcagctctttctccttattataatcctgtacagtatattgcaccggctcgtcccaactccacacctgcacattgggacggttctccgccaattgcaacgtatccttttgtctaggctcaggcgatgtgccaaaaaacaaccgggaagcactcttcgaaaattgtaatttcccatgctcgctgattacccatcctttcggaaaagcccgattgccacgtgccgcaacttctgttgccggtgctccctgctgtgacagccacaagctcatggctttataacaagaatctttctgtgcacaatataagaaagccaagtttgctccatcttcatcaaaagttacctgtttaaacaccccgtcaccttcttttatcagcgtcttcacacctgtttccgtattcagaagatacaatcccggcttttcctctgctttatcacctgcggtaatataataaagcattccgcttttctccgcaaagttgaaagctttcacagcaggagcctcataccgggtactgaggtttgcattcaacggttggacatacaaagtcgagtctttccttcccttctgaaaagcaacccagtccgccttctctgccagcctgaatgttttcagtgaatcaatcacttccctgccgcccgaaagcgaataaatgaccaatgcatccatcggcatcttttctttcttcgttttctttattttcagagaatccactatcatcttgccgggtttctgcgacacaaccaaatagtcggaagaagccgagaaaagaaaacggtccgcccgcggaaaagtggcaagttccttcccttgtgcatcatacaaattcaccacagcatctccttcccaaggttccatcttgcatgccacccactttccattatcagaaatagcttgcccgctgatacgctgccaggcaactaaattgtctactgtgagacttttcgaggctgtctgcgccatcacaggcgacagattccctatgcataggacaagagccagatactttacatgtttcatatccattttatcgttactgattagttcgatttttataaaagcttatctttctcatattccgttttatcttcggccgcaaccagatttaattccctgccgctctctccatacgaaaccgcatgacgtactgcaaaattttccaagaacaaatggttcagcgtaaacaatgccccattcaagtgctcatttctgacagaaggttttgtattcctactacgaatccgagacatgcatttacgatgctgtccgggagtcaagacacccgccatccatccactttttaaataatgcaaatatataaaaaacggataaaagtctgattctaaacaataattttgtacttttactgtcgcatataatccatatacattcaacaccaaacaataaaagccatgacagcaagaaacaaagttctaaccatcatgggtatcattatacttatcgggattatctcaataggattctttgtatttccaatcggaatttccatgtgcgccattacaggcttatgctatggctgcaaatataaagacaagttgtttatcagatggtcatctgtaggattggtaacaggtatcggactttccatttacacctggtgtttaatctcgtcaatgtaaaacagcataagttcagtaaaaaaaagaggggttacgacaacccctctatttcaccattcacgatatcaatatgcaatgcctgcggttccttcggcaatcccggcatacgcattatttctccggcaatgactaccagcatctcagctccggcattcatcacaatatcttgtacatggaattcaaaattgtctaccgcaccgtaaattttggggtcggtagagaatgaatactgcgtcttggcaatgcagatagggaaatttccatatcccaattctacaatatgcttcagtttcttacgggcagcggcactatacgtaataatgctggcaccgtataaattacaagccaccttcgatattttagtttctacactatcctcatcatcataggcatattgcaaaggctcggaaggttgttcctcaatggttttcacaaccagttccgccaattctactgccccttcgccaccatcagtaaaggcgttgttcactgcaaagcccacacctttcttctcgcaatgggtacggatataatccacttcttcctccgaatcatccccataacggttaaacgcaacgacaactgtctgaccgaaatatctcaaattacgcaaatgcttatccatattggccacaccctgcttcaaagcttccagattgggttcctttatcttatcctgtgatacgccgccatgcattttcaatgcacgggcagtaaccaccaagacggtcagtttaggtgtgatacctgctttacggcacttgatatcatagaacttctccgctcccaggtcagccccgaatccggcttcggtaatagtataatcactaaaagtcattgccatcttggttgccagaatagagttgcaaccgtgagcgatattggcaaacggccccccatgaacaaaggcagcagtatgttccgtagtttgtaccagattaggagaaagagcatctttcaaaagaactgtaatggctccggcaactcctaaatcttttacagtaaaaggcttgttgtcatacgtaaaacctaataaaatattttcaatgcgacgacgcaggtccttttcatccttggccagacacagaatagccataatttcagatgcaggagtaatatcaaaacctgactcctgggtaattccgttggtcttcggtcctagtcctgtaacaatataacggagggaacggtcattcacatccaacacacgacgccacagcacttccttcaatccgaaaccattatcacgattctgataaaggtaattgtccaacaaggccgaaatcatattgtgagcggaagtgatggcatgaaaatcacctgtaaaatgaagattaatcttatccatcggcaaaacttgggcatatcctcctccggcagctccccctttcattccgaaacaaggacctagcgacggctcgcgcaaggcaacaattgttttctttcctattttattcagtcccaaagccaatccgatggaaacagtggtcttaccaataccggctttggtaggagtgatggcagtaactagaataaggttactctgctgcaccttttcttcgtttatctgactttcatccactttggcaatatagcgcccgtaattactgatgtgctctacaggaataccggtttccctagccacttgtttaatcttgaccagctcaatgctgcgtgctatttcaatgtccgttttcatctttttactaaatttaggcggcaaaggtaatatatttccttaactttgttttggtttcaaacaacaaaataatataaggagtaagcaaatgaacaattttgtattttacagccctaccgagtttgtatttggcaaggatacagatatccaaaccggtactcttgctaaaaagtataacgcccggaaggcaatgattgtttacggtggaggctctattattcgcagcggattactgcaacgcatagaagattctctgcaacaggcaggagtggattatgtaaaattaggaggcgtacaacctaatcctactgacccgaaagtttacgaaggcattgaactggcgcgcaaagaaggcgtggactttatgcttcccgtagggggaggctctgtcattgacactgcaaaagccattgcggcaggagtgccctacgaaggtgatttttgggatttctatataggaaaagccaaagtgaagaaggccttaaaagtgggtgtggtacttactattcccgctgccggcagcgaaggttcgggcaatacggtgattaccaaactggaaggtctgcaaaaactaagtttgcgtgtaccggaattactacggcctgtttttgctgtgatgaatccggaactgacctatactctccccccctaccagacagcttgtggcattgccgatatgatggtacacattatggaacgttattttaccaacactcccgatgtagaaatcagtgaccggctgtgtgaagggactttgatggctatcatcaaagaagcatataaagtgaagcagaacccgaacgattacgaagcacgcgccaatatcatgtggtgtgggacaattgcccataacggtacttgcggagtaggttgtgaggaagactgggcatcacattttctggaacatgaaatcagtgctgcatataatgtgacacatggagcaggactagcagtaatcgtacctgcatggatgacattcatggcagaacacaacccgaaaaagattgcccggtttgcaaaccgcgttttcggagttcccgagaatgaggatttggaagaaatggcacttgccggcatatcacgattgaagcattttttcagatacatgggcctgccggtcaatttcaaagaattgggtatagaacatcctgatattgaactgctagtgaaaaaactgcatgaaaacaagggagaatgggtaggcaattatgtgaagctgaacaaagaatatagtaaagagatattcgaactagcctgcaaataacccacacaactaaacagttctaaaacataggcacccggtttatcagtctttaccgtaaagttcctaaagtattctattttccagacgcgccggcacgaactacgttattcgtgccagccgcatctgagaaatatagcaccattaagcgacagacacttcatgcaacaacttccctcttgcccatttatactccaacattttccaccttttacttcactatttatatgctttttagcataaaacgctaggtttttccaaccatttaaagtaacttcgccggacttttttggagaaaaaacaatgtatatattccgatcaattcacgaaataataaatacgatttttgtagctaaagggctattggtagagatgtttgagaagagaaaagtacttagttttcgatactcggacgcactagccctattgaaagaggatgaaaaccgtttaaagatactcatcgaaaaggaaatcatacaccaaaacggaaattttgtggaactggatgcccgattccttgatttcttcgaactgctgctggaagcgaacgaggaaatcaacacggctaccgtagaggaaaacatagagtacctgcacgaactgatggactactacctgaaagaaaagatccagtcgcgcaaggaaagttatgtacgcaatatcaagattacctttcagaaactggcacgtgtaacgatacggaacattatcaaccttcaacacaatattgataatgctttcaaacacgagcccacataccagataaaaatagccaaactgcaaaatctggacaagaaacgaatcaacatccagcggttgatagactctaccgaacatctgattctgcatgaagaacgggatttcttccgccaggccactgacgaagagctgacccgcatcctgctcgaactgcggcaggaactgcaactatcagctcacagtctgattcgtgcccagcaggatatcatcaattacctgaaccaaataaagaatcaggtgatactggtagaaaaaatacgaaaagtaaaatatctgcaagatcagttcgagttacgtgcccggagtaatctgtctgaaataatggaacgggaacgctccctcctgttggaaggcaatacacaagcatcgttcaaactgtcccccagctatctggccagtgacgaagtgcgtcccatcattctgaaagttatcagcaatcagaagtatcgtgaaattgtacggaaaaatgaagccggagctttcagtgaagaagacttggaagcacaggccatgtacgaagaagtgattaatctggacgaagtggtaaccgcctttgtgcagtcgggggcagaagcccgctggaaaggagagccggtcagcgaccttttttcctttctgttgcaatatcatttccatcgcgaagtggatgaaaaggaacgtaccacgttcttctgtcagattgtttcactttacgagagccaactggaaatccggaacgagttcggactccacaatcaatatgaatatgctaaaatatacccactctgagaattatggatttaaatatacaaatacccgataataccgcatccatctttgaatacctgcaaaaaggactgttcatcagttccaacagcaccagcgaagaagtacgcgatatgtataatgaaatagatgagaactacgaatctctctatcagtatttctcacaaataaactatacactggaacggggaaacgaatatttcttcttctcccgtatagaacctaaagccacactggagcaaaaaatcatgcgtgcctattactggatagatgtgctcgattttttcaaaacctacgatgaaacattcggtcccggattccgcttccagcccgaacagatattggtggaaaccaacatcaacatgctgctccaaaacaaactggacggtatgcggaaacacttctcggacaaggacatccgcaaggaagtgctggaaaacatgatacgccagctcaccaaagactcgttcctggaacaggaaaatgagaaaaccaatacgtataaagtgatgagcgcctggcattatctggaaagactgattgaaagtatcaacatttacgacgaaaccgaagatgagaaacctgagtagaattatctttatcaatagtgcgaatatcccttattcggacgatatctatctggacggaaacgttcacttcatcggtacgcagggagtgggaaaaagtacccttctgcgtgctatccttttcttttacaatgccgacacgcaacggctgggcatttcggtggaaaagcagaattacacggattactattttccctactccaattcgtatatcgtttacgaagtggcaacagagaacggcgcgttctgtattctgagtttcaaatcgatgaaccgtgtatgttaccgcttcatccactctccttaccgcaaagaattctttatagacgagaatcgggtggcctatagcgagagcgaccgcgtgcgtgccgtgctggaccaatatggcatagaatattcacgtatcatctatacctacgacgagtatcggaacattctgtatggaaacagtacaagtcctgagttcagccggtactcgctgatggagagcaagcaataccagaatattccgcgcactatacagaacgtgttgctgaattcgaaactggatgctgaatttatcaagaaaacaatcatttcttctctgaatgaagatgaaacggccatcgacctgaacagttacaaggagcatctgaaaaactttgaaacccgtctgaaggatatcgaagaatttcagaaacgggaaacccggaaacaggctcgggaaatcacactgttatcccaacaaacgtccaaactgcaaggcggactggtgcagaattgccgcgaactggttgccgctttccgcaaagccgaaagtatccttccccaatggaaagagaaacaagaccgcacggatgccgacaaaggaaaactgatacgccggaaacaggagcttcaggatgaatcgcgcaaacgcagcgacaagttacaggaagcgctggcagtgctgaacaacgaactgcaaaaggcattaggcaaagaaaaggactatcagaacaagaacatagaagagattatagaacgctcttccaaaaaagaggaatggaagaaccggcaggtgggattgctggaagaacaacgcatccttacctcacaatatatggaaatatccaccaagtataaatcgctgattcaggccttggacgagcaatggaacaagattcatgaagcgaaaatcaaacaactggatacattaaacaatgcatacaacgagcgtctggaagaggcccgcaaagaataccagcggttcacagattccctttaccaggagttcgaaagcctgtcacagcaactccatccgctgaaagccgagaaactgggcgaactgaacgctatagattaccagataaaattatgcagaaaggaggttttctttgaggaagagcaacaagaattgaaaacacgtatccaaaactatgccaacttccacacggaacggaaaaaccgtatcgcccaagcgcagctcatcatcaaggaactgaccatgacttgggaagaggaacagcagaaacagttgaaagaaaaagacctgactttgcaaaaactgcaacaggagatgctgcaactccgtccccgcatagacgaattacaagcttttctgaacaacagcaaagacaccttgcaaggctggctgaaagaaaacaaaaagggatgggaagagaatatcggcaaactgtgtgatgagagcattttatggcaacgggggctttttccgcaaattaccattgaggggggaaactcattctatggcatttccattaatttagacagcatccaccgccccatcaaatccatagacgattatatcgtcgagaaagaaaacggtgaaaaacgtctggaagaaatcactgctgccatgcaacgccagcaaactgaaagggaggagttgcaggaacagttgaaacgcaaataccaaccgcagataaaggaacaaaaagccattatcagccaaatagagtatgaactggaacaattggaacgccaataccagcaggatatgctcgacttggaagagtggaagaagaaagccaatgaggaacggaatgccaaaataaaccgattggaaaacgaacagcgcaaacgggttgccgaactggacggtataaacagcaagctaaaaaacctgaacaaagaaaagacagagaaactggatagcctgaaacaggaatggaacaagcaacaacaggctcttgccgccgaaaaaaagacacaagcggaagttatcgggaaggaagaaaaagaagaacaacgcagaatttcctccatcaaaaccgaatatgaagcggatatgcagaaagagcttcactcgcagggagcagataccgaacgtctgcaagacattgccaaccaactggtccagctggaaaaagagctttctttcattaaggagaatgcgacactggtcatcgaataccaaaaagacaaacgggatttgatagaccgtattcccggatggcaacgggagcacgatgaacaaaaacgtctgctccaattggaacgggaaacgctgagagtggaaacatcctccctacaagaaaaaatagaccttctgaacaaagaatgggaagaagcggaagaaaatgtaagggaactgcaaaagaacctggaggcttacagcaagattccggcatacgactggtataaaccgcatcaggatatattccgttccgaaaacacgcaaaccatgcagaccaccaagacctgtatggagctgattgacgaactgacccgccaggccaaccaattcacgcaggtgcaaagcaagctccgtaaagaagtgaaccttttcaccggacattttgatgaggacaacaccttcaagttccgcgtaaaattcaacgaggattgggaatatgtacgctttgccgacgaactgcacgactttgtggaagaacaccgcatagacgagtacatccgccgcatcaacaacgagcattgggataccttcaaacgtatcagtatggacacctccatgctgacttcatcggaagatgatattcaagatgtgatccgtgaaatcaataaaggtttcgccacctgcaattttgtgggagtcatccagcgcattgaaatgaaagtggaagagagcagcaaccgcgtagtgaatattctgcgtgagatacagaaatattaccatgattacggctatgacctctcaccggaaaccaacctgttctcctctgccaaggagcaattggtgaaagaagaggctatcactttgctgcgtacctttatcaaggaaatacatgcttaccgctatgacagtatccgcctgtatgattccttcgagttgcgtttccgcattgtggagaacggcaatgacaccggatttatcgagaagatagccaatgtggggtcggaaggaaccgacattctggtaaaagcgatgataaacatcatgttgctgaatgtgttcaaggaaggagcatcccgcaaattcaaagatttcaagttacactgcatgatggatgaaataggcaaactacatcccaacaacatcagcggtatcctgaaattcgccaatgaccggaacatcattcttatcaacggttctcccaccgaactgaaccgcgatgcgtataagcacgtttacctgcttaccaaaggaacacagaacaagacccgcatcgcacggttaatctcagataaacagctataaaagccagtaataacaatctgtatatttctatattataatgcacaatctctcaaaaaaagattgtgcattattctttttccgtgaacattctccttacatgtacctgctacggttgggacggagagcttgtgaaagttcctccaccttttttccacaaagaaaagagcggcttccattcctgcaatattcatatcagagtaacccaaacaaccggacaaagaacaaatttacatccacttttctccatacaaagggaataacattaaacatatttgtgtaatttcgcccggtaataaaactacaaaccaatacgcgctatgatatttaaccggactgaaaaggaagaaaaagcctatctcatggatattattgctttattagctgccaatatcgaacagatggataaggccattgaagataaatccaaagacgtaatggagcacaaactctacttgtgggaaaatctgtccgaactggaccgagccgagaaaagtgcggtccggcagatagtcacccaacaagtagcagccagcgagtccttggccgagaaaaagaaacgttatcgcaaaatgatggccatcccctatttcggtcgcatcgactttcaagaaaaagggcaacccgaagtcctgccattatatataggtatacactcatttttcaatcctcccaccaatgaaaatctgatacacgactggcgtgcccccatctccagcatgttctatgattatgaattaggagaagcacatttcgacgccccctcgggagaagtgaaaggtaacatccgtctgaaacgccagtatcgcatccgtgacggaaaaatggaattcatgctggaaagttcactgaatattcaagatgacatccttcagaaggaattgagtggaaactccgatgaccggatgaagaatatagtcgccaccatccaacgggaacagaataaaattatccgtaatgatacatcgaacaccctgattatccagggagtagccggttcaggaaaaacatccatcgccttgcaccgcgtagcctatctgctataccggcacaaaggggaaatcacgtccaatgatatcctgatcatttcccccaataaagtatttgccgattacatctcgaacgtacttcccgaattgggagaagaaaaaattgaagaatgcggctttgaggaattaatgctcaaaatactggacaacaaatataaaatacaaaccttctttgaccaggtggccgaaatactggacaaagaggaagaagattttatagaacgtatccgattcaaatccaccaccgagtttatccagcagatggataaatacattctatatttggaacaaaacgcatttcggccaaccgacctgaaagcagggcgtatccctatccctgccgagtacctgaaagaacgtttcgcggcatggcaccgcctgcccatgcgcagccgtttccaaccaatggcagaagaaattgcccgcgaactgactttcacctatcaccaagaaccgatgggaaaaatacagatacggcagttgggtaatgaactgaaaaagatgttcaacaataaagacctcgacttatacaagggattttatgactggctgggaaaaccggaaatgttcaagcagggtaaaaaccggaaattggaatatgcggatgtagctccattactttatttgaaactggccctggaagataataaaaccatgtatggcatcaagcatctgctggtagacgaaatgcaggactatactccgatacaatacaaagttctggctaaattattcccttgccggaaaacaatattgggagatgcaaagcaatcagtaaatccatacagttccaccacctgcgaacagatccaacgtgtactggtcggctcggaagtgatgaagctttgtaaaagttatcgctccacgtatgaaatcacagagtttgcccaacgtattgccaagaacgaggaactggaagctatagagcgtcatggagaggaaccggcagtcgccttgctgcctactgaaaagaaagagatagaatggatagaaaacctcatcacctctttcctgaaaggagctgatgtatccatgggtattatatgcaaaaccgtaaaacaagcggacaagttgtatgcagccatcaatcatttgtctgataagatctgtttgctgacagaagaaagtgtagcttttgtcaatggggtggtcattactacagcccacatggcaaaagggctggagtttgacgaagtgattgttccatttgtaactgataaagactatagaacagagatagaccgcagcatgttatatgtagcctgcacccgtgccatgcataaactttatatttccgcatcgggtaatataagtacatttctatcataagcattgacaaaacatcatccattgcaggaatggaatgaaatccatccctacagtggatgggcaagtctgcaaaagggtattcctccgtaaggaatgcgtagccttgtaatctgattcatccttaaaagatcttacccatatctctaaacctttcccgccgtaggggtaaaggttttcttcctgtttgttttatctccacaagtctttggagttatctccatagccttgggagtcaactccaaagcttatggagataactccaaagacttgggagatagaatacatccgtataaaaaggcttgatcaaggaagagaaaaggcttatgtaacagcgacggatgcgatatgttgttattacaagccgtttccaatgtacgaatcataaagacaaaatctttttttccctctccaaatcattttcattcagttggggagacggaaccatgcaggtacggatacaatctccctcctgacaagtatagtcataatacttcttttgtaattctgtcaacttatcgagtggaaccagctcccctttcagttccaggaattcctccatgtctgtactgtctccttgctttacaaacaagatacggcgcgctatcggattcctgttgtaatccagactaagatacaaacctttaaggaacggcggaaaatcatacatcggcaattgcagataaatactgaacaaagccatttgcggtgactcgcgctcattaaagaaaatatacccgttctgatgattattgaataatcccactccccgatgcgttgtattataggcactcatgtgagtcaccttcacatacgtattgtcttcggaagcctctatcagatagggttccactttaaggcattggcacgaagaagaaagactatagctcagataacttccgctataattataaacttcctgcacggaacgttgcatctcggcagtcatcatctccataaaaggattggtctttgcctcaccatgggcaggttccaaactgaaaagcaactctttgatacttgccaaattgcccaacagacgtttttttgacacattattgacctgcgccaaagccaaatctaatgaatcttcttcagagtgtccttgtttcaatgaggttacataagtgggcagaacgctggaataaagagcagacaagacactgggagctatatctacataatctgctatctccttcattttcaaaccattgttacggagatattctattcttcggtatatttctatcaaatcattcattgttctcttcttctttattgaacttgcaaaatacaagtttttatatgaacatacaatgacatatacattacattaatgttacatcatacaacaggtggaatatgaaaaatattaatcataaagattcattttttctctctcggaaggcccctacttttgcttccggaaacagcaatccaaggacacgaggagtgaggttcctacaaagaaaagaaacaaaacaattagtcaatatcaattagtataatggaagcaaaaagcgaaacaaacaaacagatatccagtttcctgtttatcctgtgggcaggaggggcggcactactgtcatactcactggtatatgccctgcgcaaaccttttacagctgccacctttgacggaatggatttcttcgggatggactataaagtagccactaccatcatgcagattttcggctaccttatttcaaagttctttgccatcaagattgtttcagaattgaagcgcgaggaccggttgaagttcatggtatgctccgtagcccttgcagaactcgctttagtcttcttcggattactcccccaaccctttaatgtgtttgccctattcttcaacggactggcattgggatgcatgtggggagtcatcttcagtttcatagaaggacgcaaagttaccgatatattggccagcttgctgggggtaagtatggcggtgagctcaggaatggctaaatctatgggattgtttgtagtcaatacatttggtgtcacagaattctggatgcccgccctgataggtggtttagccttcccgctccttatcctcatggggtggtcgctcaacaagttgccacaacccacagatgaagaccgcgccctccgttcggaacgtgtcaccttgaacggagagcaacgcagacaactgttcaaaagttatatgcccttgctgatcatgctgttcttcgccaatctgtttatcactattttacgtgatataaaagaagattttctggtcaatatcattgatgtcagcactatttcttcctggttgttcgcacaagtggacggtatggtgacgctgattattttgggaatctttgccatgatgtcgttaataaacagcaactacagagtattgcaggtgcttctggctatggttattggtggagcgggcacaatcagctatctggcttttaattatgatgcattgcaactgcctaccctttactggctgttcctccaaagcctgagcctgtacatcgtttatcttagtttccagactctgttcttcgagcgcttcatagcctgcttcaagattaaaggaaatgtgggattcttcattgccaccatcgactttatcggatatacaggaactgtctgtgtactgctgttcaaggaattttgcagcccggatatcaattggatggagttctataaccagttctcgggatgggtaggcattgtgtgcagcattgcattcatcggttcggccatctatctgatgcaacggtataaattggaaagacagctgagaaaagaagaaaaaaataaaaagatcatcgtttcaccgatggcgttaaccaacttaaaggaaacagcagaaaacatctgtaacccataacataaaaataaaagtataaccaaataaacaacaaacaagaagatgaagaaaattgagtgtgttattatggactgggccggaacggctgtagactatggatgcttcgctccggtagccgctttcctgaaagcttttgccgagaaaggactgacagtgacaatggaagaagcacgaggccccatgggtatgaccaaaatagaccatatccgtgaattattcaagttaccaagtgtgacggagcaattcaaacaaaactataaccgcaactggactgaggaagatgtggtatccatatacaaagaattcgaaaaacacttgttcgcctccctggaagaatatacgactcctattcccggtgtaatcgaagtaatcgagaaactgaaaagggatggcatcaagataggttccaccaccggatatactactgccatgatggacattgtgctgcccggtgccgccgcccatggctataccacagacaactgtgtgacttccaacaatcttccggcaggacgtccgcaaccctacatgatttaccagaacatgattgatctggccataccttccgttcaaagcgtaataaaatacggggatacgatagccgatatcaaagaaggtgtgaatgccggtgtatggactgtcggtgtgattctgggcagcaacgaaatgggactcacccaagaggaaaccggaaaactgcctgcagaagagttgaacagacgcatggcagcagtcagaaaacgtatgtatatggcaggtgcgcattatgtagtaaacaccattgccgaacttcccgaaattattgaaattattaaccataaaatgaattaaacgattatgagaccatacttacttttaacccccggccctttaaccacttctgaaagcgtaaaaacagccatgatgaccgactggtgcacatgggatgaagactacaatgttcacatcgtagaggaaatacgtaaaggattggtacaactggctacacgaaaaacagatgagtacaccagcatcctgatgcagggaagcggtacttattgcgtagaggcgaccttgggaagtgtgattacgcccaaacacaaattattgattctgagcaacggtgcatacggagaccgcatgggaaacattgcagaatatcatggaatgaactatgatatgctggcctttgatgaaacagaacaagtatctgtggagtatgtggatgattatctggcacacaatgcagaaatcacgcatgtggcagtggtacattgcgaaactacaaccggtatcctgaacccgttaaaggaaatagcccacatggtaaagatgcatggtaaaaagctgatagtggatgcaatgagcagctttggcggcgtgccgttggatgtagaggaattaggcatcgactttatgatcagcagtgccaacaaatgtattcagggagttcccggctttggtttcatcattgcacgtaaatccgaattacaatattgtaaaggagtatcaaagagtctttctctggacatctacgaccaatgggatgcgatggagaaaggacatggaaaatggcgtttcacctcgcctacacatgtagtgcgtgcctttaaacaagccatggacgaactggcagccgaaggcggtgtggaagcccggcatgcacgctactgccgtaatcacgatgtactggtagaaggtatgcggtcactgggattcaagaccttactgaaagatgaagtccaatcccctgtcatcacttccttcctttatcctgacaaggagttcgatttcaaggaattctatcatcagttgaaggaaaaaggattcgtcatctatccgggaaagatttcccaggcagatactttccgcatcggaaacatcggtgatgtgttccccgaagatttcagcagattgattgaagctatcaagaccgtcgcaaaataaaaaataaatctagctttatggctcgggcgcagtgattgcgcccgaatttgtttctacccttcttccgttacaagatcatttggaaccggagctgcacgacactgaaattcttatcactaatctcctttatatgctttcccggcatcacccagctataagccagcttcatccctatatgcttattcatgtaataattcacgcccaatgaaaaatccttttgagcccctccccacacaccggcttcctcattattcatatcaaggatattaaatcttccatacagctccaatgcccgccccacaggtctgcccggacaagccaatgcttcatcatacccatattgcctgcctgtcaacaaccaggagcattgcacatatccgccatgtcctgtataatttgtgaaattctgttcacgcttcaccatagtccgtatatactccccttgcaaaaagaacctctgatgagcaatcattaattccaccccttgtttcaactggtactttgcatgatctaccttggcgtaaataagattccggttatcaatagtgctcacccccggagatttataaataaacgtattctcgtcttcatctcccggcaatgcgctatccggagtacgatacaccaccgccgcacctatgtgtaacaattttccctcttcgtttacaggacgatacaccaaacgaccgtctatggcatatccttgtgaaatgtttttcacattacccaggtcactgtctgtaaagaagcctccggaagcataataatgttttccattgtaggtataggaggttcccatccgtctgccattggtcaaagccagcacgattcccggtgactggtgaaaacgaaggtcgtacgtactgcatagcatgtccaaggtgaaaggttcataaaattgtcccacctgaataatatgcttgcccgaagtataagcagcaaaggcatcctttatggaaaccttattccctacataccccacctccattttcatgctccaattctgataggtcgctttcacccccaaccgcaagtcattaaactccgtaccgttaccaaactggttgtcattctttaaataaacgccaccatccataagcatccgtccggtcagtttacacttcaaatccccggcaaccgggtgttgcgcgcgggcaactaaagcagcagaggggaataacaggcacatcaatgctttaacataagtcattcttcccattgtattcttttgttttttactttataacaaatgtaagaggaatgacctatactaaaaatgaataaccattaatttgatgatgaagttattacgcgcagaaagcaagtaatattcatttcatatttatgtaacagaattgtaacttacatttcccaataacgttcacaaagattcaagtattccatctcaggcttgttgccgaacaccaatccgaagaaagaggtcttcctccgcttaatcacttttacctgttccattaaatcgcgggataaaggcggcatctcgaaatctgagatcaatacgatatccgattcacggaaatcatttccgttgatgatatgcgcagcttcccgaagagccggctctatatccgttccaccgtcaaaacgtttattcagaaactccgccaacctgggcatatcccgccccaaatcttcaatcaacaacgatacagcctcatccgagaaattgatgacataacatttccgatgggttttctccgtcagttgcgctatagccagaatagccgatttggacaagatctctctgtttccctgcatggagccggaagtatccacacagataatatagggtcctagccccgaaaccttatgcttgtcatcctttaccggttccgtttccttggactggtaatcgaactgttgcaatctcttttcggcatatcgttccataaatacggcacgcagcgcatcatccgccagatagcaatactcgacgggcagcaaactgttcaaatcatttcccaaagtcacccctgtgatatcactatgcggagagtgcctgatcagcctctttttatctacgcccgacaaagaatcgtatttttgttggtcccggtgcttcttgcccagcagacgcgccaattgccggatagccggattgcgcttcatcactgtttcatacggaagcatcctccggtacaaatcaggataattatgaagcagccactccatgcgcgaccccaacagtttgttacccgactcctttccttgcttccggatcaacaaatcaaaaccttcacataaactgtttatatgcatgtactgatagtcatactctttgcgggtaagcaactgatgccatttatccaaaaagaactccttggtccgggccccctctcctctcagcagagaagcattctccagcaaactgatataatagtcaatattcagttccgccagttcatacctctttttgaaagcaccgcgcatctgcttcaagtattgcaagaatgccatatccggcagatgttccgaagaatagaaagcctcccactccggagtgtagcgggaataatattcctgcaaagaaggtgtggtacgccgatagtacatcaacactttctcttccagttcgcgttgacgcaccaccccgttgctcacatcctcctcgtatgctttgaatgtcctatctttcagttcctgagaatagatcatcttcagatctctcaaccttatattcctggttctcttttcggtacgcatctgccatttcgttcaaatcattcttatatcggtctatggtattcttctggtggcgaagcatcctccgcatggaagcccgctgcctttcgctgagaaacaaatgcttctcataatattccgtttccgcatccagcagcccggaccaatccttctccactctgtccaacgcttcggccaccgatttatatttggctccgaaatcctccggctcgggttcgggcggcggtggaggacaattctcatagcacatcaagtgatattcataattattgatataaatggaacgaagcccttttttcagcgtatatatcttattacgcggaactttggcatggagtatggaatcatatttcttcagaatacagcagttggctttgtacttgtccttatgcaggtagaataatttaccggtctgatccagatgttgatagtcggctgcaaaaataaggaggcgctctttcatccggacgccctctacctggtaatagtaagtatcgatgacctgtatgcccggatcgttcacttcacgcaaactgtgttcggacgattgtcggtctttcagttcttcaatgtcctgttccagcccttttatattcagcagatagccttcggcacttttctgaatggcagcattcaccatctcctctgccgcctccatctgatccatctcactccaaaggcaataggacagcaatgtacagtccgaaaggcggatagtgtccgatccgttcaggaaagcggaagctttcagcagcttcaccattttcttccaccggcggtccgacacatacagaggagacgacacacccccctcattttgtatctggaggttatattgctctatccggtctttcaaggcatgaatcacttcgaaaatagagtaatggattttaatggcagccatctccttttcccaccggatgtattcctcatcggtgatctgcagttgctcgtccaccaccggttccgtttcatccgtagaggaaatcatccggtcaaattctcccatatcctcaatgcctcccaccagacagcgaagcaggaaacggtcccacaaggcctccagtccctgtccctgggcaggcagttcattggaagcggcaatcagccctttcagaggaacacggatggaaaactgtccgttacggtatattttttcattgataatggtgagcaatgcattctgaatggccggtccggctttccatatctcgtccaagaaagcaatggtggcagaaggcagataaccatcgacaatacgctcatacgtatcttcgtctttcagtttggaaatggagacaggaccgaatatttcgtccggcgtactgaatcgtgacatcagatattcaaatgcggaagcgttgcggaatgccagtttcagccggcgccctaccatacttttagctactcccggagggcctaaaaggaaaatgctttcccctgccacagccgaaagcagagccagagccacaatatgctccttttcaaaaaccctttcattcagttgttgtaacagagatgctatacgaggtttcaatgtattcataaaaattatcgactaatgatgatcaactagtggtgcattaaccaccaaccactccttgtttcttatgcaaatatctgaaaaaaggatgtatttctcactagaatgtattttttctttttgcagaattgctgttttttcatgatagattggataagttacagtgacaaggtttatatcttacacaagcatgtagtattttctccactaaattgcctacctttgcaacttcaacaacaaacaatgattccaaatgaaaacaaacttgctttcctccgataaagacccgatgggaactgccatcgccgattatttcaaccacaacaaagcagataagttacgtgtattttcctcacagttcgaggaagacgaaatacccgtgaatcaattattccgcccttatgacgaaatgccggaactggaacagattgccttacaaatggccgaaggaaatattctggacgtaggagccggaagcggctgccatgcactggccttgcaagagatgggaaaagaggtatgcgccatcgacatttccccccgttctgtagaagtaatggaaaaaagaggggtaaggaatgtccgtcagatgaatcttttcgatccgcattttctagaaacattcgatacaatcctcatgctgatgaacggatcgggcattatcgggaagttggaaaatatggcagctttctttcaaaagatgaaacaactgcttcgccccgggggatgtatcttgatggattccagtgatctccgttatctttttgaagatgaggacgggagtttcctgattgatctggcaggagattattatggcgaaatagacttccggatgcaatacaaaaatataaaaggagattctttcgactggctttatgtcgattttcagacactcagcctgtatgctgccgggaatggattcgaggcggagcttatcaaagagggggagcactatgattatttaacccgccttcgatggaagggatgacacttatagaaagattccgataaacttgtcgcatgatattcaaattcttggggcaagatgctgcgtatcttgccccaagaaaaaaaatcaggccattgaaccgcctactatatccaacagctcattggtaattgcctgttggcggctcttattgtacatcaccgtcagatcctgcaacaaatcattcgcattgtctgtagcaatctgcatagccatagtacgggcggcatgttcggaagcattcgaatccagtaataccgtgaacatcttcatacggagtaccttcgggagcaattccctcatcaccacatctacagacggttccacaatataatcgggtatcctgcctttgtcctcctctttcttctcttgtgtcaagtctatcggaagataggtttcacgcgtcaggacctgtactgctgtagaacggaaatggttgtacagcaactccaccttgtctatgtcacgatgcagaaagcgcctcatcaagtcctctgccaaggcggcagcttcctgataggaaggtttatccgccatatgctggaaatcgccttcggccttgaatcccaatttcttcacaccttccgctacctttcggcctaccgggtataaaagcacgttctccatacccagagacttgtattcatccagaataaccgtcagatgcctgatgatatttgcattgaacccgccacacagactggtattggaggcaaacacgacgatagccacacgcttcacttcacgtttcacaatgaaaggagactccacctcactatccgcactcagaaaattggtcaggatgtgattcagccttcgttcgtaaggaagcatgttttctatggcagcctgcgccttatgcaacttggcagaggctaccatcttcatagccgaagtaattttccgcgtattatttactgaggctattcttccttttacttctttcagtgatgccatgactattcgttcactttaaatggttgagccgtatcagctgctactttctctataattgcagttacatcatcatttatcacaccgcttgacaatacatcaagcacatctttctgatggtcggcacgcatcatctccaggaatgatttctggaaatcctgcaccttatgcaagggtacatcacgcagcaaactatgtgtaccacaataaaggatggctatttgttctccgacaggcatcggactgtactgcggctgtatcagcaactggttgttcttacgtccccggtcgatagccattgccgttacaggatccatatcactgctgaacttggagaaagcctccagttcgcgatattgtgcctgatcgatcttcaatgtacctgccaccttcttcatgctcttgatctgggcactacctcccacacgggatacggaaatacccacattgatagccggacggaaaccctggttgaacaaatcggtttcaaggaatatctgaccgtctgtaatggaaatgacattggttggaatatacgcggaaacatcacctgcctgtgtttcgataataggcaatgcagtcagtgaaccacctgcctttaccttgcctttcaaactgggtggaaggtcattcatctgttcggccacttcctgctggttgataatcttcgccgcacgctccaacaatcgtgaatgcagatagaagatatcaccgggatatgcctcacgaccggagggacgacgcagaatcaaggatacttcacgataggctacggcttgctttgacaagtcatcatacactaccaaggcatcccggccggtgtcacggaaatactctccgatagccgctccggcaaacggagcaaaatactgcaatgcagccggatcggcagcagtggcagctaccactatggtataatccatcgcaccgcgttcacgcagcgtattcaccagactggctacagtggaacccttctgaccaatagctacataaatgcaatatacaggttttcctgcttcatagttggatttctgattcaaaatcgtatctatagcgatagaggtttttccggtctgacggtccccgataatcaactcacgttgtccacgcccgataggaatcatggcatccacagacttcagccctgtctgcaaaggctggttcacaggctgacggaagatcactccgggagctttacgctccaaaggcatttcgcacagttccccgccaatctgtccgcggccatccaatggtacgcctaacggatcgatgacacgccctaacataccttcgcccacattaatagaagcaatgcgtttggtacgtttcaccaccattccttccttaatctgatcagtaggacctagcaataccgcacctacattgtcctcctccaggttcatcacgatagccatgataccgttttcaaactccagcaactcattggcttccgcgttgcgcagaccgtaaatacgtgctacgccatcgctcacttgcagcacattccccacctcgtcaaattgcaggtgggtgtcgatgcctttcagctgctgaagtaaaacttcggatacttcgctgggttttatattttcagacataatctttttacattaaaaattgaaaattaaaaattaaagtccgaccaggtattaaccttaaattaaaaaccaaaagatacaaactgatatacttttactttctaacttataatttttaattttatactattcttctatttttagctataaactgttgctttacccgttttatctggttagctacgctcgcatccaatctgtaagttccgatttcaaagataaaaccaccttccagtttcggatctattttggttttgaactctacagttccatgagttttctctacgaccaatgcccgtatgcggttgactacctcttccgctaccggacaaacagtcgtgattttaccgacgctgatattcttctgtttccgataaaggtcaatgtatgacataatcataaactgcaagaatttctctcttctttcctccagtaccaattccacaaagcgtttcaattcttcgctcaccttacctcctccggcggcttcgcaaatcagtttcaactttgtttcagcaggcaatacaggattatccaatgcctgtcgaagttcggggattctcgagaaactatctgccaatattccggcttcctcataaacagtatcctctgtccccttttcgtcggcataggccagcaaagccttagcataacgcattgaaatgactcctatatacataacaatcagtctttagaaacagttaattcatccagcaaacggtcaatcatttccatttgttctttctcatcatcgaggttcttgcgcaaaaccttctcagcaatgtcgacagacagtacagctacttggcggcggatgtcgctgatagcgctgtctttttctgcctgaatctgctttttcgcttcatccagcagtttctgtccttcaacctgagcctgtgttttggcttccttcagaatacgttcgcgggttgcgaccgcttcattcaggatgcgcgcctgctcctcgtgagccttagccaatatcatttcactgtctgctttaatattagccaattgctcattggcttcacgtgcagcaagcagtgacttgtctatatattgttttcgctcatccaccattctggtgatcaccggaaaaccgtattttgccagaatgacaaaaacgataccgaaaacgatgaccatccagaataacagaccgctatcaggtgttaataatgacatgctaaattaattataagaacaaagttaataaacaaacaataatggcgatcagggccacaccttctaccaacgcggcgataataatcatattcatacggatatctcctgccgcctccggctgacgggcaattgcctccatggcagaaccaccgattttaccgataccgatacctgcaccgattactgcaatagctgctccaagtgcagcacctaatttccctaaacctgccgcagcagcggactgtaataaaactgctagtaacataatagtttgttttttgaattaattatttaatttatttcatttctttttcttcacgcatctcttctgtacgggacaacccgataaagaccgcggacaacatggtaaatacgtatgcttgaataaatgcgaccaataattccagcgcagtcataaagattccgaatgccacagcaacaaatcccatggaaccattgatcagaggtcccatattcgccgtaataaaaatgatggatatcaaactgagaatagcagcatgaccggccatcatattggcaaacaaacggatcatcaatgcaaatggcttcgtaaagattccgaaaatctcaataatcggcatcatcgggaacggagccttcaaccaccaaggaacatcaggccatagaatctctttccaatattccttgttcccccatagattcacagccaggaacgtacagatagccagcacaaaggtaacggcaatattacctgtaatattcgcaccgccggggaagaaaggaatcaatcccatcagattattgatcaggataaagaagaaagccgtcagcagataaggtgcataacgcttataatccttaccgatacaaccctttatcacatcatcattgattgccaggatacaagcttccatcatgcccaccattcctttaggagcttccttttctactggatgttttttgtaccaacgggcacaactcaacactagaatcaccagaatggcactattgacaaacaacccggtaacattctttgtaatagagatatccaaaggttttacttcgttaccgctagcatccttttccactatcttacctttatattcaccgtctttagcaatgtacagtccttcatactctccgtttccttcctcaaacctagaagaaagaaaaacgtgccatcctgtactgctttttacgattaccggcagtggtatagctataggtgtatctcctatgtcagtgatatgccattcatacgaatcacctatatgtccgaaaacgatttcatttacgtctacctgctgctctttatagtcagtttccgactcttcccgggcattggctccttgcagaaaagcgatcagcaacattaaaaccgttcctatatatcgtaaacttctcatattacttatacttgtacctattacttttatgttttatctcaaaatgaaaaaagaagcgggtttcaaaaatcagaaagataatatagaataccatgtaagttcctataaatgaaagtacttgatgtgccaccgccactgcatagacggacataatcaagatgctcaacatcatcttcgtcactttcgccaccaagtaaaccgccaccattttttgcggacttacccgataacagcatccgaacataaatatgtaaaagaggccgaaaagataaaaaaatatcggtatggagggataccaggcaaaataatacctaggcaacaaggtgtgaaataccaaggctcctccccaactcaatacaaccattaatatggtcaacgatatgataaattttctctttacggctaacaaaaacataattatgtattagatttccacacaggccgaaactatattgtccctcacctcaacgaacccactcgatattccaattgatttctccaattcgtcctccgtgtattttatctcgccttttatcagtgatgatatcagcggagcatgatcatacaggacagaaaaagagcctaattcccccggtagtgtcactatttccactttgccgtcaaacaaagtactttccggagaaaccactatcaaatgaagatcttcatgatgttccatacttacttttatttcttatggctggcagcatccagcaacttctttcccttttctattgcttcctctatcgttcctacattcaggaatgcctgttccggcaagtaatccacctcaccgtccaaaatcatcttgaatccttttatcgtatcttcgatagaaaccatgacacccggcacacctgtaaactgttcggctacggcaaacggttgtgaaaggaaccgctgcacccgacgcgcacggtttacagtctgacgatcttcatcactcaattcgtccatacccaaaatagaaatgatatcttgcaactccttgttgcgctgcaaaatctgcttcacacgctgagccacatcatagtgctcctgccctacaatcagcggatcaagaatacgtgaggttgattccaacggatctacagccggataaatacccagttcggtaattttacggctcaatacggtcgttgcatccaagtgagtaaatgtagtagcgggcgcagggtctgtcaagtcatcagcaggtacatacacagcctgtaccgaggtgatagaaccattcttggtagaagtgatacgttcctgcatctgtcccatttccgttgccagtgtcggttggtaccccacggctgacggcatacggcccaacaaagccgaaacctcggaacctgcctgagtgaaacggaatatattgtcgataaagaacaaaatgtcacgtggtccgttgctgtcaccgtttttgcggtcacggaaagattcggcaacggtcagccccgaaagggcaatggaagaacgcgcgccgggaggctcgttcatctgtccgtacaccaatgtggcctgtgacttttcaacttcattataatctactttggaaagatcccaatgaccttcttccatgcttttcttaaattcttctccgtagcggattacaccagattcaatcatttcacgcaacaggtcgttgccttcacgtgtacgttcaccgactccggcaaaaacagaaaagccgttatgtttcttggcaatgttgttaatcagctccataataagcacggtcttgcctacaccggcccccccaaacaatccgattttaccaccctttgaataaggttccagcaaatcaataaccttgatacctgtgaagagcacttcctgcacagtagacaattcatcaaacttagggggctcacggtgaatgggaaacgccccttccttactcaacgggcgcataccgtccacagcttcacctactacgttcatcaaccggcctttaatctgattaccaaccggcatagtaataggatgtcctgtcggaattacttccataccacgttgcaaaccgtccgtactatccatagctacagtacgcactgtgtcttcaccaatgtgttgttgaacttccacgactagaattctgccgtcattgcgtttgatagtcaatgcatcatgaatgcttggaagaagcagatcggtgtcgatgcctttgccctcaaaatacacatcgactaccggtccgataacttgtgaaatatgtccaataatctgtgacataagcttctatttacttttatttgataatttaccttttctatattaacaaatatcgcaggctttttgtttacctaccttttgctttatatgcgcagcaaaggtaaagattatctcagtagattgaacttaagctaacattttttacacatcaatacgacattattccaccaaaagaagaaaaaaagaacatttccgctactttttgtgcattccttcacgagataactgtttacttaaattagcaattcccaaagcaaccactgctgttaccgtagctgcatgctcttggtattctggtatattcttcgtataaagatcacgttccgtatgccatatttccccataagagaaattatatccttttatgtcttgtgtattgaaaccaaaagtaggcactccttccactgcaaaaacactggcatccgtaccgccgctttgagtaggacgtttaaagggtttcgctacctttacctcaaacggataatccgcacggatctctttcacaggcttacacacttccacaaaatcatcatacatagcctgaggaacggagattcccaccggtggagtcggccctccgtcccggttgaacagattggcaatctttcccaattcttttgcatgagtcttgacatatgcttttgcacccaataatccaaattcctctccagcaaaagccacaaacagtatagtacgtttaggttttgcaccggaaagtgcaatcatacgggcagcctccatcataggaccaatgcctgtgccgcagtctataccaccggttgccacatcataagaatcaagatgtccgcttataataacatattcatccggatatttagtgcccttaatggatgctacgacattatgatatttcacaggacctagtttgaaatgattacgaatatcaaattccagccaaaagttccgtcgttctttcaccatctgtttaataatcttgtattgatgttcatccaacttgatatcacagacttcgggcaaattatcaaacgtagtatggggatcattcaataaagcacgatcatacaaagcacgtaaaggtacaggtgccgactgaataaagccaagtgctcctgcctcacacatctctttataaaatagtcccggcatttcacgcaaaggcttcatggcatgtttggttcctttgctccaattctcttccatcaaggcagcattctgcttttctatttctatattttcagctttgatagcagctctcaacgaatctcctttagcagaacggtcaacaggccaacctacattttcacctgagatcaacacccaagcgcctttcaactgatgtttcatgcggtccagctcttcttgagtacggggctctatcaaaacatgcccgcgttgcagacctttagtacctgaagtgtaggatggagtgacaaaatgcagatccattgcctgatctcccccgattaaacgtccgaaccatggaccacggttaaaacctaccggcagttctccagcttcttccaagcgtacatcaataccccatcgtttatattcacgcatcatccactcggctgcattctcatacgcatccgagcctataactcttcccccaaaacgattggtgagaatatccaactgatgcatcacccggttatctgtttggcccgtttcaatgattttctttacggcggcaggttgggcaaaagtagtccctgcatacaaagaagcagctataacagctgccatgcacattttgttcatcatggtatttctgtttgttagttgttaacgattacaaatatatagcaaattttggaacttcaactattaatttccaacaatttatcaggagaaaccgaatatttttgaagtcgtacaatacaaacagtattaaaatgaaagtttattcagctttcatttctttctcaaggcttttggcatacagattgtcaatgataccatcagacagtccaatgaccggaacataaatatattctgcatgcactacttctgcaattttcagaaaaatttccgcagcaggcacaattacatcggcacggtcttgctttagactgaatgcctctaccctttcctccggagtcagcggtttcaacacatcatagactgtttgcaacgaactgaccggcaaacgttgcaacttcttatccttcttatctgccaggcggaacaacttattaatattcccacccgatccgatgatattgatcgcggcaacaccttccgtcactttcataagctcttcttccatttgctgccaagttccttctttaacagcattacttagcatacgcaccgtaccgatgttgtaagacaccgaccataccaactcaccgttagtcaacagattaatctctgtactgccaccacccacatccacatacatataattacccagacggtcttccatacactctatatgattattataaatcattcgagcctcttcctgaccatcaattatctcaatgcggatacctgtatccttttcgattttcttgattatcgtcctcccgttacgcgcgtcccgcatagccgaagtagcacatgccctgtaatcatccacatcataaattttcatcaactgacggaaagccttcatcaaacgtctcagcttatccgctttcttctcggacaattcacctatggagaaaacatcgaaccctagtcgtaggggtacgcgaagcatcatcacttttttaatttttttctcctgcacagcctccctgtcaatgctttttatcaaaagacgcacagcgttagaaccaatatcaatagcagcataattcacttttcccatcttaatcctttattctgttttcatttaaataatatttgtataattcctcctgcgaacggaaagctgtcttatcttccgatatccaaggacgattctctcctgttccgtccaccacccgtccttgcagagtatctttcaaaccatattccactacccgcttcaagtctgcctttatttccggatcgtaaacgggagcaatcacttccaccctgttatccaaattgcgcggcatccagtcagccgaaccaatgaacattttctcatcaccaccattggcaaaaataaaaatacgcgaatgttccagataacggtctatgatgccattgatacgaattgtatcactcactcccggcactcccgtaatcagtgaacaattaccacgaaccagcaagtctatccgaacaccatgcgaagatgcttcatacagtttcttcaccattaccggatcagtaatatgattaatctttatcaaaatgtaagcaggttttccggcctgcttgttcttaatttcttcattaataagacggctaaatttttgcttcatctcattaggagataccaacagttctttgaagcgaacgggagaataagggcgttctataaaatcaaagaccaaactcacgtcacgcgtcacattcttagcagccgtcatcaacatataatcagtgtacatacgggcgttaccttcatgaaagtttcctgtactgatacaagctatatccgcacctgttttcatggatatataggtaatcttagagtgtaccttcagtccctccaccccaaatatcacacggataccggcatcctgcattttctttgaccaatctatattggaagcctcgtcaaaacgtgccagcaattcaataactactgttactttctttccattgcgtgccgcattaatcaatgcttttaccactttcgaatctttagccaaacgatagagggttgtcttgatactttttacttctttattaatcgccgcttcctgcaatatacggatataagaatcgaaactatgataaggcacatgaataaaacgatctttcctacggatcagctccaacatgccaacgttacccgaaagctcatttttcaaaacaggagtccattcagggtatttcaaatctttccggccacagtctggaaaacgcatcaggtccttatggttatgatattttccaccgcccaatactgtatccaacttatccagattcaacttgttcatgacacgttttaaaagatctttaggcatactggcatcataaataacccgtaaaggctcacctcgtttgcgactctttactcctttagaaattttctgcatcattccgttacgcagatcattgtctatctccatctccgcatctttggtaaacttgaaagcatacgcttcaaaatgtttatagttcataccatgaaatatcaatggtaaacaatagcgtaccacatcatccaaatacatcaggtaatttttaccatccttatccggcagacggataaaacgccctgcctgtgctacaggcagctctataattgcatattctccaactttatgtccttctttcctcatctttacagccaaaaagatattttcatccgcttcgttacccagttgttttactgatttcagccagacaggactaataaacccattcagccgttgttgataaaaagaatcgacaaataactgttgttcctcatccagttgtacatgattgactaaacaaatattttctttctccaattctgccgttacctgcttgatcgcaccttcatattctttagagtacctgttgttcagtttatttatctgtctaatcagtttcaatgcttcttcccgttcagaatgcgccgctttatcttcgcactcggccacccggctttgagtagctacacgtactctgaaaaattcatccaaattattagagtaaattcctaaaaagctcaaccgttccagtataggaacacgttctttcatggcttcctgcaaaatgcgacgattaaaatacatccaactgatatctctcggcagataatatttatcttcctttttcttcttctccatacggttttaatatttttagcaaaaatacgtcatacacattacaataacatgtcaatataactacaaatcaataacaataaaaaagtcacagccgacgcatacagccatgacttaaagagagtttttataagaaaatcaaataaactcttcaaccaaatacatctcattaaataaaacttgttgataattggaagaatcactctctaacaaattcaacaaagtatattcagctccacgtacccaatacacaaaatcacgattggggtggtaatctttcgcaaattccagcaactgttgcaaattaaaatcggaggaaatgatacccgcaccgcttttttcggcatcatatgcattacagtcctgttctatatgggcaggaaccatcagaataggcttgcctaaatacatggcctcgcacaccgattcaaatccggcagtactggcataagccttgcatcccgccatctgcctcaaaaattccacatcatccagttgataaaagctcaatgtattgtccactctcttcaccggttcctcctcccacttgtcccaaaagaaacgaagcggtatcccgggatgttgcctgtgccatttcattacattttcactgaaacccgcattaaccatatagccatgtatatagtcaccggaataaggttcatgtaaagtcacttccctacgcaacaagggaggaatcacacggatatgattctgaggatcatccttcatgtgacgaaaagaaagagccaaacgttccttcgcccccaagctggtcaatacggtaaaaaacttcaaaagagccaagcttactttatcagcctttggaaattcaaaacttttatgcaagaacagatattgatgtcctatgcagatttgcggaacagagggacggaacaggaaataagtcagtccggtcagcaattcatagaaattgataaccctgtccgcaccactggcctcgatacgctgacgaatgtagttaatgctattgatatacacaggaagtttcactagattatacgctacgctccgcatcaaactcacccgtttgttggctggtgtaggcagaaaattaggactgacaaaacgttttacgggagcatggatgttacgattgaaaaatcccggcaagcggcgcgaactacttttacctaccagtacttccactacttcgtgaccgttccggcgcaatatttcctccaacgtaatggcttgagtaagatgtcctctcccctcaccctgtactataaataaaaatttcatgaggctgtatgtattagggtaaactctttattttcttcattctcatcagctagtacatgatggtattccatgatattccaattcccgtccgcatcctcagtcagtgccgaaaggctttctacccaatcgcccgaattcagataatgaataccatcataataggtattagccggatgatggatatgaccacaaatcactccgtcacatttacgtacacgtgcaaactccaccaacactttctcaaagtccgatatataggaaacagccgactttactttttgtttgacggcctgtgacagagaataatacggtttcccccgctgggtacgatattggttataaaagcggttcgcccataagaggaatgtataacctgcatcgcccaaccgggctaaccatttcatctgtgtggtaacccggtcgaatagatcgccatgtgtcacataataacgctttccatgtgtttcaaggatgtattctttgacgatttttacgttatagaatgtcatagggaccaagctgtccaaaaaatcatcgtggttgccgcgcacataaataacttcagtaccgaagttctccatcatcttcatgataaccttaaagaaatcagtatgttttgcttgccacttcttagtacctgccttgcgcaaatgccaaccatctataatgtctccgttcaatatcagacggtcacaattgacagatttcaaaaagttactgacctctattgttttagaatgagaggttcccagatggatatccgataaaaccactgtaggataatacgttctcagatgcatatctttattattaaaactatgcaaatatccatgttatctgttacaagatcgtgtcggcaaaattactatgctattaaaattaatgaaaagacaggccgtttcttcatggaacaagaaacggcctgcaaagcttcagtttatcatacataaaccatacttcaatctataactaacaattaattgtcaatatcaatcacattgaactgcatatcaaactttatctcccaaccattagaaagtttcacttcatagtcatgcttgtccctctcgatcttgagcatcttggcatcggggtaattcgtagcaacgtacttctttattgcgtcaggaaccacagcgacaggtacagcgctgtatttgcaattcacttctgtccaaataccttttttatcgaattccagtttgtctccattagtaaaaatcacatcatagcttttatcaaaccagtctgtttccattttagccatcgccaccttattatcggggaaatgagttttgataaaagtctgtgcagtctgaggcaattggtttacttgaataggtttgtcatcatccgcccataccactgtttgcaacgtaaataagcacactaacaataataatacctttttcataatcgtcattttttttatttggttctacattctgttttctgatgcaaatatgaagggagattctgaaaagaatttgaaattctaaaaaaaacacgattttttttattgattatgagtggatgcataaagtgtaaaacaatgctccccgctcttatattcatagcaaagcctgagagcctgcattttacatatcgtatctgctattgccaaacctagaccggtagagccttcttttttctttccttgataaaaacgctcaaaaatacgccgggcatccagcggttgtgccgcccctgtattgcagaacatcacactgtggggagtaatgacaatccggatgtgcccaccgtccatattgtgcacaaaagcattcttcaacaaattggtaagcaacaccactgccaatgtttcatttatcgtaagatagaaaacaccttcttcctctatacttgttatgatctcacgatattgatacacttctttatagtcctccagatattgcctcaataatttattcacttctacttggacagtatccgtaaattgaccgttctctatcttcgaaagcaataacaaagacttgttcagcttcgttatatgttccaaagtctggtgggttttcatcaactcttccaattggctttctgaaagattttcatcctccatcagcatctccaaccgattacgacaaatagccagtggtgtctgcatctcatgagatgcattaccaataaattgtttttgctgttcgaacatctgctcactgcgctctgcataacgaacagccgcttcatttaattttctgaattctgaaacccgggtattattttgtaaaggctcgtttaccttaccgatacgatatttatccaaccaatgaagcaatacataaagaggacgcatattccgataaaacacccacacattaataacaattatagtcaataataaagcgatataaagaaaaataatccaacctgccatagcatctttcaaatcttctttttctatagaaggagtcgctaccgtcaattcaaaaaacttttcgccatcatccttaaaaatggtcgtaaggattcgtgcaggttcagtttcatctttttcaggaatataaaccatagaatctttataaatgatatcatcacaagatcctgcatattccttcgtcacttcacgcaggaaatactgattgttggaagctgtatttttagaaggaagctcctctcccgccaatgcacgtatgatgataatttccgaataatcctccaatgagtcatccacttcatcattcacctcatccattacagcaaaatagaaaaggatggcccagccagtcaataaaaccgacaacaccaacgatatacggataatgatataataaatcagtttcatttattccactaccattttatatccaaaaccataaacagccttcagttcaggagtagctccagcctctttcaatctctttcgtaaattcttgatttgggcatagataaaatcaaaattatcgacttgatctatatggtcgccccatacggattcggcaagtgtgcttttattaaccaatctgccgggacggttcataaaataaaccagaatatcatattccttacggctcagttcaagcttctttccagctacggtcaccccatatttatcgggaaaaatttctatatttccgtatttgatactattttccccaccttgctgatgacggcgtatcacacttttgatacgtgcattcagttccaccaaatgaaaaggtttaggcagataatcatcggctccgagctccaatcctagcactttgtcttctatagagtctttggctgaaagaatgatcacattttcccgtttatgcatttctttcaacttttccaacaaatccaagccactgccatccggcaacataatatccagcaaaatgcagtcataatcataatcctctatcttttgtaatgcggtgcggtaatcggcagcaatttccaccacataacgctccttttccaatgagcgctgagtcacttcacgcaaattagcatcgtcttctactaatagtattttcataagtcctacttttggttcttaaagacaaagaaacaagataattctgaaaaaacactgaaataagaaaaaaaacgaagaaaccatacacttttttccatcacccaactaataaacaacaaatatcaaactaaaaaccgttatcaactatacaatcagccccctgcatctaccacaacaagacgcaaggggccacacacaactctctctaatcaaaccctaattatttgatttccatttgagaaaaatccatttggctcaagcctactggtgacggtgtttcttttaaatcaaaagagacttccttttcaccatttttagccgagtttatttttacctttataccctttgtttccgatgttattttcaaagatttcaaattaaaagataccgcaccgtttctccaataaccagtagtatcagcatacgtattgtaacgatactctaaatgaatatagccatcctggacaggcgtaattgtagtgttctttaccaaactaaccaaatgtttcattttagaaggcatgttctgattaaagataatatttaaataaccaccactaatccacatattaccttcaaatatatctacaggatcatttccaaactcttcttcattctctgctgtcagctcctctataggtttagttagaatttcctttatactcaacactttgactgagcaatcatatccttccggataattatcatacaaaggattgaaataaagaataacccgttgtccatctatcggggaataccaaaaataatcagtcgttgcaggccagatttgtccccatctgtcacctgtaaagtcataaacatgggcacctttcacatttacagtagcccaatccactgccacatcaccaagagagtaaccatcatcatcatcacatgattggaaagtgactcccataactgccaggaatgctaataataaaaggttcaactttttcataactataatgtattaatctattttctacttttaaaagtaagaaagagatcgaatactgcatatcatccattaatattaacttattttcagtaaaagtcttgtagaaaaaccagattcatcaaggaaataatagaaacttcccgattcgtcacgaaccgggaagcttaaaactgagttatatacagattttcccattcagggggaacatggcttttcagccttgttttgttaaggcaaatggttatatattttaaagtttagtttttagtgtattacattaatttacataacaaaaaatatgccatggggcacatcggcatccaatactctaaaaatcaacaaaataaccattatttcatttttcacattatgtagaaataccacaatttcattccacaattttgtagaattaatccccgtttttaaaatatatctttatctttgtagaattgattactcactaaacaatataattactatgaaaaaaagacattacggaatgctttcattggcacttacttcatgcttggctgttcatgcggaaaacaaaaatcaaaatacagacaagcccaatgttatcttcatctatgctgatgatttaggatatggtgacttggagtgttatggagcaaaaaacgtacaaactccaaatgtcaaccgtctggcatccgaagggatacgatttatcaacgcacacgctaccgccgctaccagtaccccatccagatattccatgctgaccggagaatatgcatggcgtaaacccggaacagatgtagctgccggcaatgcaggaatgattatacgtcccgagcaatatactatggcagatatgtttaaaagctccggctatgccacaggagcatttggcaaatggcatttaggattaggtgataaaactgcacaacaagactggaatgctcctctctctgcttctctaggtgatttggggtttgactattcctatatcatggcagccacagccgaccgggttccctgtgtatttatcgagaatggccaagtagccaattatgatccttcagctccgatagaagtaagctatataaaaaatttccccggtgaacctaccggaaaagacaaccctgaacttttatataatctgaaaccgagtcacggtcatgatatgtctatcgtgaacggtatcagccgaatcggttatatgaaaggaggtggcaaagcattatggaaagatgaaaatatagccgattccattaccgcacatgcagttgattttatcaaacaacataaagacgagcctttctttatgtatttcgccactaatgatgtgcatgttccccgttttccacacaatcgcttccgtggtaaaaacaagatgggactgcgcggtgatgctatcgcacaatttgactggagtgtaggtcagttactcgaagccctcgataaaatgggattgacccagaacacattaattattctttccagcgacaatggaccggtagtagacgacggatatgatgacaaggcagaagagctactgaacgggcacgaacctgccggtaacctgagaggtggaaaatacagtgcatttgaagggggtacccgtgttcctgtaattgtacactggcctaaagccatcaacaagccggaagtcagcgatgtgcttatttcacaaatagactggctggcatcactagcttctttggtagatgcccgtattccgaaaggaagtgctcccgacagctacaaccggttagcaaatttattaggacaagacaaaacagaccgcccatgggttattgaacaggcatccaatcacaccctatccgtgcgtactaaagattggaaatttattgaaggcagcgatggtcctaaaatgattccatggggtccgaaaattgaaactggttatttaggtattccccagttatatgatatgaaacaagcaggtgaaaaggtgaatttagcgactgaacatcccgaaaaagtattcgaattacaacaaatattgagaaaagtacgagataaaagtattcagatgaagtaacatgctgaatacacaccaacccaatgtttccaaaagggtgaatcaagacaaaagaatcacataaagggtcttgaattcaccctcttttttaatcaagaaaatttcaatatggtcctcatttcaaaagaaccaatccttatagacaaagatccttttctttaaagtcaaagtatttataacaaaacaccttgaacactttcacaagaatgggttacacacaaaaactctcaaagatacaagatacgtttttccactttacccataaaaaagaaatctcaatttatttctttattttcccttcattcaccagttcagacagcgccctggccaatgacggacgagtaactcccagcttctgcgccacctcctgctgattatgaataacagaatgtgtttctagatatttcaacaaacgagtctttaaattcaacaaagcaaactcattcaatttcctgcttaaaaagacactcctgtccgaaatatccttcaaaaaattctgcatcatcaatggatgcaaacgcataaattctaaaaatctttctttacctattacaaaaacctcacaaggtcctattgcctctacattaacgggaaaacgattttcagtggcaaaaataaaagccgaagccagcaagttaggagctccaatttcttctaccgtcagttctttcccttcatcatttatcattcccgcccgtacacttcccgatgcaagaatgtacagccctttacataagtcaccttgccgggcaatgatatcacccggttcaaagtgcttcaaactattcggaagtccgaataggaaagcaaccaattcttcctctttcattccccggaaaggagccatctgcaataatcctgtcagttccatcctactttcttttaactgttatttgtatccgctgtaacatatggtacaacttaaaagacgaaaaccgtctacttttgcacaaaagtaatagaaatcattaaaatgaaaaaagatatggagaataacatgttttgtttccaatgtcaggaaacggccaaaggtttcggttgcaccttaaaaggtgtttgtggaaaaaatgcaactacagcacgtaccatggatttattgctctttgtagtacgaggaatttctgttgtggcggatcaattgcgccagcattccctccccgttgaaaaagaagtggacaatttcattgtagacgccttattctgtaccattaccaatgccaatttcgatgacgaaagcattacgaaacgcattgacaaaggattagcaatacgtgatgaccttaagcatcaagcctctgccaaggatattcctctgccggaaaccgatgagttaaattggaaaggcagtcacgatgaatatgatgcaaaagccgcaacagtcggagttttacgtgaacaaaacgaggatctacgctctttaaaagaactgattatgtatggtctgaaaggaatggctgcttatctggaacatgccatgaggttaggacataatgacgaaagtattcatcgtttcatgcagaacaccatcgcacaaattacaacaaaatctttatcggcggatgaactgactgtattagcactgaaaacaggtgaaataggcgttcgaacaatggctttgctcgacaaggcaaacacttccagttatggtaatccggaaattacccatgtaaatataggaacaggtacccgccccggtattctgataagcggacatgacctgcatgatctggaagaattgttggaacaaaccaaagacagtggcgtggacgtatatactcacggtgaaatgcttcctgcacattactatccggcatttaaaaaatatacacattttgcaggaaactatggaaatgcctggtggaaacaacgggaggagtttacctcgttcaatggtcctatcctgttcacaaccaactgcatcgttccccctctgcccaatgccacttataaagaacgcatgtttaccactaattctaccggatatcccggctgcaagcatattacagcagacgagaaaggacataaggactatactgaaattatagaaacagccaaacaatgtgccgcaccgacagaaatagaacatggagaaatcgttggtggttttgcccataatcaggtattacaactagcagacaaggtcgtagaagcggtaaagagcggagctatccgtaagttcatcgtcatggcaggttgtgacggacgtatgcgcagtcgtgattactacaccacttttgccgagatgctccccaaagacacagtcattttgactgcgggatgtgctaaatatcgttataacaaactagggttaggtgacattaatggcattccgcgtgttttagatgcaggacaatgtaacgatagctattcattggcagtcatcgccctcaaactgaaggaagtattcgggctacatgacatcaatgaactgcccattatttacaatatcgcctggtatgaacagaaagcggtaatcgtattgctggcattactcagtttgggaataaaagagattcatctcggtcccaccttacccgcattcctctcgcccaacgtgacgaaagtactggtcgaaaactttggagtaagcggtatcggtacagtagaaagtgatatgagaaaatggggattaacgaacgaataaacggaataattatgaaacagaaaaattaccattcatgtacagtcggacaaattgtagccggcaactttgatacaaccaaagtattctcccgttaccatattgatttttgctgccatggcaatactccgtttgcagaagcctgccggaaccgtggtattgatcccgaagcagtagcacatgaattaaatgaattacaagagaatacggttagtaatgctcctgactttgccggatggcccatcgatttattaatagactatgtattgaaaatacaccatcggggaatccgtgccaaaggtccgcaaatagaagcattattaaccaaagtaaccgaagcgcattcaaagaatcatccagagttactgcaagtccaggcactgttccgcgactcgcttcttgatttggaaaatcatttatcaaaagaagagaatgtattatttccttatgtttatgaaatgttccaagccaaagaggaaggcttgaaagtagctaaattccattgcggcaccattctgtatcccatcgaagtgatggaagatgaacataatcacgaaggagaacgttttgaaaaaatctcttcattaaccaacggattcactgcccctgaagatgcttgtgccagcttccgcttggttttacaacaattgaaacaatttgaagaggcattacatgaacatatccacctggaaaacaatatcatttttcccagagcattagaattggaaaagaaggaagccatctgataactacaccatgacacttccattcacaaaagtgcccaaagtgaaataatgcacaaatcactttgggcatcttcatgtattataacccacgctccactatataatcttgtccctgttctgtcatcaagtcatattcatacaccttatacaaagcagggtattgcgggtttatctccttggaaaccaaaggctctttgatatctgcctgcatataatattcattcggattcttaccttttgcctcttttaatccaaccccacgcaaaggaacatacgaacgtaaacgcaaattacctcccaaacgggaatgaatcttcgctttatccagctgcacgccattccagttcatatccaccacaaatcctccacgggcaaccagtccttgcacacttcctgtggcccaggcatccggaagagccggaagcaaatgtacagctccgtcatggctctgcaacaacatttcagccacaccggcagtatagccaaagttgccgtcaatctggaaaggcggatgagcatcaaacagattaggataagtccgtccttgcagataagcctctttcacttcatctccaggcagcagcttcaacatattattaataatccggaacgcatgattaccgtccagcaaacgggcccacagattaactttccagccaatggaccaaccggtagcttcgtcgccacgctgtaacaacgtgtttttagctgcctggaaaagcaaaggatgggtgtaaggagatatctgattactagggaacaatccatatacatgagaaatatggcgatgcttgtcattcggattatccaagtcttccagccattcctgtagctgattgtatttcccgatctgcatcggggccagacgatttaacatagaccgcaaagaatcttgataagaagcggacattttcagaattcttgacgcatgcaatgcattgctaagcacatcgaaaattatctgattatccatcgtacaacctgacacaatcgttgaagcttttttagtatcctctcccgaaggtccatgttccggagacatggacggagcagtcaccatccaaccgtattcaggatgttcagtcaaataatcaagataaaaatcagcagctcctttcaatgccggataggcttcggaaagaaacaacttatccccactatataaataatgctgccacaagtgggtagtcaaccaagcacctcccatgggccatgtaccataaaacgccttatccaccggaccggtggcacgccatatatctgtattgtgatgagccacccatccgttgcatccatacatagtccgtgccgtttccctgccggtaactgataattctttcaccatttcgaacaagggctggtgcgtttcactcagattggtcacttcagccggccagtaattcatttccgtattaatattgatggtatattttccatcccatggagcagccagtttattattccatataccttgcaaattggcaggctgacctcccggctgggaggaggaaataagcaaataacgtccatactgaaaaagcaacaccgccaaagaaacatccttaccttcattgaacagttcgatgcgtttgacagtttccaacttagcccgctcactggttcccaaatccaatcttacacggtcaaactgctctttataaagagctatatgctcctgtaaaacctgactataagggcgtcccaatgccagagacagatatccggacgcttttttactctcattgccacttatatcgtgataattaataaaattcgtacccgatgaaacatacagagtaacactgtccgctccttccactgtaatgttttggtcatcaattttcaccttacctccatccacatcagcctgtgtctgtgtttccatacgaatcaatcctttcactccctcatgatccctaccctttccggtcagaaccaatttctttcctttcctgctgactttatgctccaatggcgacacatatccgaccttaaaattcagttttcccggccggtctgctgtcaaacggaccactaccaccttatcaggaaatgatgcaaaaacttcacgttgaaaagtcacgccatccactttgtaacgggtagtagccaccgcacgttccaaatccagatcacgataataatcggtaaccttttcatgtccgggggtttctataatcaaactgccgattgtctgatagggcataccatgctttccggcataaaagttttcttgaatcaagttctgagcctccatgttttttccggcgaaaatcagttcacgcacttggggcagactttccaatgcttccggtttgtcattccggtagggactgcctccccacatggtttcatcgtttagttgaagttcttcacgggccgttccgccatataccatcgctcccatccgggaattgccgaccggaagcgcttccacccacgttccggcaggttgcttataccacaatttcagatcaccagcctgaatagataacgaaaaagacaataaaatgcctgctaataatgaataagttttcatggttaatagatattgtataatgtacaaatataattctattaaccatacaaacgaaaagacagaagcattttattgtctaaaaaacaattatgataaagaaaagaccaaatattacacctcctccctatctgataaccggaatcacataatcgtattttctcaatatttccgttacaggagacagtggaagcaagtcagggcggggagatataaaagacttgctgccgatagccgagcaatgccgggaaatgggattcacggaagaactgacaagactgcttgcctacttccaacccgtagggttcaggggaaactgcattcacgggaacaccgggaaaagtccggaacggcatattcaacggcaacagtaaagaggaatccgcagaagaaaggaaagttccggttgtgcattgacggaatgcctatacttgaatggttcaagatgaaatttaaagagcttaaggaaaagctaggtgtaggccacactccaaaagagaaaaacaggccccaaagagagttgagaatataattctttggtagaaaataaaaatgtaattctaattgttaatgaattgcactttgagtatttttgtaaatactttgtttcactgataaataaaccaagatgaaaactatatttttatgtttcttctgtcttttcactatcggatgtacgcatcagtccagtcaagaaaactgtgtagaaatcggcagtgcggatagtatttgtttgcaaaaagaactatatactttacataagtatgtggatagcattattaaaattgacaccattttgcaacaacgctttcattgttttggagctggactaaccaaagacaaagtatctattgacttccaagatataccggaagattcttttgagtcttttcaatcggcattcaagaaagaaattgttgactctccattattggagttcaacataatgacagatatcacaatggatattgaaatcattccgacaacagaaactaagcaaccgtcgcacacaacatcttttgtgttacagcctacccctcgcaatattccaaccggagaagccatcagttcagctttgctttccatgaaaactgaatatgattattacccattatcgacaacggaggtgaaaatgattgtcaccaattattcccaacaagaatatacatgcggcaacggctacagccttgcttactacaatgataacaagcaacaatgggaaacattgccgaccgaccccgttattgaagatgtaggttggatattgcagcctgaacacccctcgaatgaacagactatcaagctctatacttctgaagttcctaatcgtgcaggtaaatatcgtatttacaaagcatttaacagagatacaaaaatagcttatgcagagtttgaacttatctcatcagaacaacatcaaaaattgcttgataaaataatgcaatatcatgcgaatcatgcgaaagcacgagttatggtgaatctgaactcttggggatttagtgagaacgataccttgtatatggattggatggttaattctgcggagttgagggatgagttcaggcaaaaagtgctgaactattccgccataataataaatgatggaaaaacggacgtgccgacctattttaacgaacctatgcatatggatactttcggtattaggatgtacacggagaaagcgatgtatccggtaaatacagagtctgtatcggtaagaatcgtgaaccggagtgggcggagaatttcaatggggtcttcgtacttagtacttcggaaggagggtgaaaaatggttgtctcttcctggagcaacggtttggacactcgaactacattgggtaccatccaataaaatctaccccttccctatcagcctttatccgtcactcaatgccattacgcctggcgtatatcgtgtagtgaaaaagatagacatcgggaataactgtcacaactggtattttaccgcagaattccggattggaaacggtacagaagaacaggatattttgaataaggagccttcctcaaagccattgtctgaagtggaagaagaaacggacatggatattgcttatgaagtagtggaagaaatgccggaatatcctggaggcatgtcggctttattagattttatacaaaacaatttgcaacatgacaaagcaaattcccccaaacgtgttattgtacaattcatcattgatgaaagaggtaatatttccaaacctattatattgaggagcataaatccggaactggataaagaagccttgcggatagtcagcctgatgccccaatggaagccgggcaggcagaacgggaaagcagaaagagtaagatataccctacctatcatattcaatccttctattaaagagtctgatatgattgaataaaaacacccacttttacatcctttaatgtaaaagtgggtgtttttattcaaatcattgataatcaatgtttaacgcaacacatacggaactaacggattttgaaaatacttatgatattcagtaaattataacgtttctccgaaaaaagcacccaattttgcatctacatagcttctatgtttttctgtaaggaatttgccttgttccaacggtgtaaaaatactaatttttaatgaagtatgatgtgtaccaggggctttttatatggcctcaaaaaaagaccctaaatttgcacctgacatacttcgtagaaacgctatattctgcttcacctcaaacaaataaaaaagccctaattccgttgggaatcagagcttttcctaattttgctttcttgagaagcggtgcgtacgggactcgaacccgtgaccccatgcgtgacaggcatgtattctaaccaactgaactaacgcaccaaatttcatttttcttatactgcatctctctcgattgcggttgcaaaggtacgcaaaatttcgatatctgcaagcattttacgaatattttcttgaacttttttacatcaactctgataataagccatttaagatacaagaaaaataaaaatacaaaaaaaagagagcacttcatgtattttttaaatataatatgtatattagtcgtgtaaataaaaggaaacgcaactatggatatgcatgtttttcaagtagaatcaaataaagtacttccacaacagggaagcatccttatatcctcccctttcatgaacgactaccactttacaagagcagtcgtgcttcttatcgaacataatgacgagggaagtatgggtattatcatgaataaagatttccgttaccacattctgctcaatgacctcatccccgaattggaattcgcacagcgggtcccggtgtataaaggcgggccggtgagccgggagacaatatttttcctgcatacgctaaaagatctggaaggcgcactgcctctgggaaacgggctttatctgaatggtgatttcaatgccgtgcaacaatatatactggacgggaagcccattgaaggagtgatccgtttctttgccggttatgcgggatgggatcatggacaacttgccaaagaaataaaagagaactcatggctcataggaaaagccgggaaagaaacgttgctcaaccagcacttccgcgacttatggcataccagtttgaacgaaatgggaggcaaatacgccatttgggcccgctatccccaatacccctccctcaactgagattcagcttctgaacaaccagcacatccgtatagccaccgccaaacgtatgcgcccactctttcaataccgcactctctttgtacccgcacgccgcaaagagtctgcgggaaggaaggttttccacagcgatataggcaaacaactgatgaattcccagataacggaaacagtgttcttccagcaaagctagggcgttacgccctatcccctgcctgcgacaggatttatccaccataatccccacctcggcccggttgtgcaaaggatcaaaagaacatagatccacaatccccaccacctgccggttcccgttttctatcatcaggcgcaactggcggtcggcaaacaaatcattctgggtctgctctatgtactgcttcaactgaaaacgcgaatacgggcctgtggtattgctcatctcccacacatccgtagcgttctcaaagcggaacatgacttccaagtcttccggctccggtgcacggagccttatcccgttcccttgaaaatgccggtcactcatcataaagcaggctcctcattctcctcttttaccaaatccagctcatccagcatccgcttgcgggtagggacacagaacagggaagcgatcagcgccatcatggcacacaatacgcccgtgttgttcagagtcagataataaaatgacaagttcaccaatacgggaaccaccagcatccccgtccttatctcactccagcggcgataacttttcaaggcttccggcaatgaacgctgcttcacattcttcaccaaggaaaggctgaacagccggagcgataaaggaatcagccccaccgccagtaaaatccctaccgtctgcaagacataatccatacggacatcgcccgcgtaagccccctcggtcatcacccctgtttcataaagagccaccaggagcaaaggcaacacccataccgccacatattctatctgcaagtatcgcagcaattgtcttatcttcttttccatttctttctgtttttcccagtttatgccgttcccgtaaacaaagtacgatttatgatggaacgtcccaacgtcacttcatccgtatattccagctcatccccgatagagataccacgcgctatcacactcagcttcacgtccatgccgtccagcttgcgcgagatatagaaattcgtcgtgtccccctccatcgtcgagctcaaggcaaggatcacttccttcacctcaccgcctttcacccgttccaccagactttctatctgcagatcggaagggcctatgccatccatgggcgagatgactccccccaggacatggtacagccccctgtactgctgcgtggcttccaccgccatcacatcacggatactctccaccacacagatcgtggaagcgtcccgcgccggattggaacagatacggcaagtttccgtgtccgatatattatggcacactttacaatatttcacttcatgtttcaaggtaatcatcgcattaccaaacgcctctaccacagctgtatcctgtctgagcagatgcaataccagccgcatggcggtcttgcgtcccacacccggcaacttggcaaactctcctaccgctttttccagcagcatggacggatattgttggttcatcagttattttgtattataatggatgcaaacttacgcaatttcaacgattttgagtacatttgcactcaaaaaaataacatgaacggaatttatattctgctgaccatactgctctatttcggaatactgctgcttgtagcccgccttaccggccgtcattccgataatgacgcgttcttccgcggcaaccgccgttctccctggtatattgtttctttcggaatgatcggagcctccctttcgggagttaccttcgtttccgtcccgggtatggtacgcggcatcgacatgacctatatgcagacctgtttcggcttcttcataggctatctcatcatcgcccacgttctgctgccgctttattacaggttgaacctgacctccatctacacgtatctgggagaccggatcggaaggcacgcttataagacgggagcctcctttttccttctgtccaagatcatcggagccgcagcacgcctttatctggtatgccttatcctccagcattatgtattcgacgcctttcatattcctttcgccgccacggtgatagggattgtcttactgatctggctgtacacccgccgcagcggcatacgcacgattgtgtggacggacagcttgcagacactctgcctgctgctggcgctgggattaatactttatgaggtttccggccaactgaatctggattttccgggactggtacatgccatccgggaaaatgagcacagccgtatctttgtttttgacgactggcacagcaaacagaatttcttcaagcaatttttcagcggcatcttcatcacgattgtcatgacagggctggatcaggatatgatgcagaagaacctgtcgtgcaagaacctgcgtgaagcccaaaagaacatgtattgctacggcatctcattcgttccggtcaatttcctgttcctgtcactcggaatcctgctgttattgttcgcctcgcaactgaacatccccctgccggcagccggggatgagatactgcccttatttgcggcggaaggccatctgggattcgccgtactgatattctttaccatcggtatcattgcagccgccttttccagcgccgattcggcattgaccgccctcaccaccagcttctgtatagacatagcgggcataagccatttgtccggcaaggaagcggaaagacggaggaagctcgtgcacttctgcatatcagtcctctttatcggattcatcctgctgttcaaggcagtaaacaacaagagtgtcatcgacgctatctataccatcgcctcgtacacttacggcccgttgttggggctgtttgcattcgggctgttcaccccaatgcggccgcgcgaccgttttgttccttacatagccatcgcctcgccgctattatgctatgccatagaccggctggtgttcacctccaccggctatcagtttggctatgaaatgttaatgtttaacggcttcctgacttttatggggctgacttgtttaagtataaaaacaaagaattatggaaatactcagtgcagaatttgtagtaagtaacacaaaagtagagaaatgcccgcaggacaacctgcccgaatatgcatttatcggccgttcaaatgtaggtaaatcgagtctgataaacatgttggccaaacgtcccaaactggctatgacttcctccactccggggaagactttgctgatcaatcactttctgatcaataaagaatggtatctggtggatttaccgggatacggatatgcctcccggggcaagaaacaggtagaaaagatacagcagattatcgaggattatatcctggaacgcgagcaaatgaccaatctgtttgtattgatagactgccgtctggagcctcagaaaatagacttggaatttatggaatggctgggagaaaatggagtacccttctctatcatcttcaccaaagccgacaagctgaccaatggcaaggttaaggataatgtaaacaaatatctgaaaaaactgacagaacagtgggaagaactccctcctcatttcgtatcctcctctgaaaagaaaacaggcagacaggagattctggattatattgacagcattaaccggtcgcttaaggcatagcgtcgaattacctagtggtgactacttagaacgcaaatgacacaaatttatacccgttcctatttgtgtcatttgcgccatttgcattccgttccggcaaacgctcagagttttatggtcttcaccttacccggaatcaccgtcagatgcaccgtaccgttgcattctatatccaccttctggtatctggcctccaccaccacttttccgtccaaagccattattccccattggcaggcgttttcctcgtaagcgcaataatagcccacaggaggcagaatcttcctgtatttgggaggcacaatgatacgttcccccagtttcaagccccatttcatccccatccggaaaggcaatgcatccctgatctcttccaaccttttcagccttttctgttcctcttcctgcaattgtttccgttgagctatcccggcacgccgcccggcttcttccttcagacgttccatcaccgtatggaaatcttcctcgcccggccggggagcgttacaggctatatactgcttttccttcccttcctccacatgataataattcccgttcccgtccatcaccacgatgctccggtccgccagacggccacagcaccaatacacttcctcctcatcccctgccagcacacaggcgaaaacatcaaacaaggtagtccagacaggatccaccagttggcagtccttcggaacacggtaatccggtatcttcagataaaagtcataaaagtagatgccgttctgatccacccctcgcatggagacatacggttttccggtacggctgaaaaagaacgctcccaccttcagcagctccacaccgccgtatggcaattccatacagccgaatgacaacaccacgggtttctcccgataggttctgtttaccttcaggtcgatgtaagattcattgcccgcacagtctgtcacggcaagcagatcccccttcatgaacttcattttccggcagcggtccagctgtattccgggctgtccggtctcattcaccacacctgcccggttattcccgaatctcactgccgcccggtctccacagatatcaaacacttccggataccggggccttaccgtcatcctctccccgcgcctcaatccccaaagcccgctttgtctgtcataataacttttcaaaacgggctgtccgcctttttccgttgcggaatcttcccggtttgtaaggaagtccatcagccggtcgtgcgttatcaccacctccagttcatcctcccgctgcctttcatcctcccgttgtctttcctcctccggcagcggaccggatacggacagcctgcctgtttccgcccgtgcccgggacagcgcgttgccaatcatccgtccctcgaacatcgccgcccagtcatggttccgggcgggcagaccgaagatgcggtacagacccacattgtctatcagcatacaggacgccttgtcggccgacctcctcagcccacgtcccacctgttgcaggtatttcgccaaggaaagcgtgggacgtgccagctgcacgaactccacatcgggacagtcgaagccttcggaaaagatatccacattgaccagcactttcaccttcccccgtctgaaatcctccaccagttcccggcgttccgaagccggagtcctgctgtcgatagccacagcctccagtccgtgtgcgctataacaagccgctatccggcgggcatgggcgatgctgacagcatatatgattcctttctttccgcaggcatatcgttccacgctctcatacagccggccgatacttgtttcccggttcagcacctcgttcatctcctttacctggtagtccccgtccgcaccccgtttcttcagcgagtctatcaaccgctgttccctgctgttcgcacggatggacacatagtcaaaggatgacaaccaaccctttccgatgaattccgcgacagtccacgaagtaatcaggctgtcgaacaagtccgtgaatcccttgccgttcagccggcagggagtggcggtcatacccagtttccttgcctccggatagttctcccaaagtatccggtaggtttccgccagggcgtgatgcgcctcgtcgataacgatcaggtccggctcttcatccatgtgcttccggtttcgtgacagccactggatggacatcaccctcacccttccgtcctctttgctcatcccgtgccgggacacggtttcctctatctgatccaccagctcccggcggtgcgccacgatccatacccggctgccggaaccacgcaggaattcccttactatggcggccagcagatgcgtcttgcccgtaccggtgggcatctgtaccatcacacttcggtgaagttcccactccttgaaaaggcggagcttcatctcctgctggtaatcgcgaagagtgtcgttcatgcaatacattatgcggatgccggtcgctaccggcaacaaaaaaaagggaaggccacatgcatcattgtatgcagcctatagtaaatatcttattctttacggattaatttttatcgaaaacccaattatcaataagtcctataaaagcacagactttaggatacatttcctgagttgctgctaaatcaaagttcttaaagtcttcataatcggcagctgaacgattattgaacaaaatagaataaaagcgtccccattctttagggaatttacctgtaagaataaaatgctggctgaatttttgacgtacaccttcatgactcttgactccgtctatctccgactgcaacaacaatccactcacagcataaaaacaggcataatacatcctattcattgccgtattgtaataaccacgctctatatgatcttttatttcatctaacaatgatttggctgaattcagcctatataaaacaatatcaaaccgctgttccggagtcataacaatatcccctccttcattatattctcataaaacggagtgaaacgttttccccattctttcatcgactctataaacggattgatttgaacaccggtttctaactcaatgtcatataaaggagcagttaaaagcatcttgtcctccaaagtaaccacatccttatctatcaacagcaacaggtctatatcactatcactacgcgcatcaccccgcgcctcacttccataaagtatcacctttataccaggagcaaccttatgtaaggcattttgtatagatttcacgatttcaggacgcttcatactccttatctttagattgaatttgttgttaactgcaatcaagcttaatacaaagaacgaaatttttcttcaaacaaacaaatattcagcatcttaattgatatcctatcgaaaagttcctgttccattatttttcgcttttaccgtccctgcaatgaaagagttcttacatcatatacggcctattcttctataacccaatcccccagggtgtgtttctccacatcaaaattgatccccaccttcaccacttgcaatccgctgagggaaaagcgttcgggatactgcttcagattgatctgggccatggccgcttccgcagacctacccagcttcaattcaatgacatacagcttaccggcaacacgcatcaccacatccacacgccccttgggggtacgcacctccacatcgacatacatcccgaacagggagaagatgatgtagaacaattgctggtaatgtccctcataattcgtgttatcacaatacggaacagtagaaaggaattcctgaagaagacgcaaggccccgtccatatctcccccggctatcgcaagatacatacgggcgatggtcgtattgcctttcagcgtgttatgggccagatagccaggcagcaagctgcgcatcagcccgatccgtatctcaccgttcggaatgtccagcgtatacagttcggccagcttgttgtaatcctttatcgtaaagtaaccgctctgatagagcagaggaacaatgccctccattttctccgtaggcgcatcgaaatcagcagccatagcctgcatacttccccctaactgggagggaaggacgtggaacttgcgtagcatctctatcagataagtgggcgtgccgctgccaaaccagtaattgttcaactcgtcattggcaaaggcattcagcaggctgaacggattatagatatcgggcgaaggccaggtaaaatgataaccgtcatatttctccttcaacttctgcaacgtttcctctttgctcatttcctgcgaaacggcaagccgttctatataagctgtcatctgttcctgcatttcttcctgagtgatgccacaaatggcggcatagggcttcagcatactgatattcaagatattgttcagctcgctgaagatgctgagttgggagaatttggtaatgccggtcaggaacacaaagcgaagataagggtcgcacgccttcaacggactgtaaaaattgcgcatcacgttacggagaacgggaagatccgtttcctcatgcatcacatccagcaaaggcgcgtcatactcgtcaataaggactaccacctgtcggccggtctgttcgttggcacgcatgatgagtgaagtcatccggtcgttcagcttcacagcctcctcaggcttgccataaatttgttcatatccgctaagctggaagctcagcatgctttccaacgtatccttgtccacatgcttcgccagactcatgtcgaagtgcagcaccggatattccgtccattcggtttccagcttctcaatggccaatcccctgaaaaggtccttcttcccggcaaagtaactgtgcaacgtagaagtcagcaatgacttgccgaaccggcggggacggctcaggaaacaataattggaggcaccgtgcaccatccggtaaacatattccgtcttatctacataaaggtagtttccctctatgattttctcaaaagtctgtatgcctatcgggcatttcttcaattgctgctgttccatcattttttccattttaacattaccgctacgaagataaacaaattccgccacttcctgttgcgtttaccgcaaaatatgacttcttttcttcagaaaagaattttacgatattggtaaagaaaagctatcccattattaggttatccgtcttcagatcatccagcattcgttttatcgcttgctgcaattgtggtatgtcttccaggcaaatacgataaatctcatcagcatctacatcgaaataatgatgtactattatatcacgtacccccatcacatacctccatggaatctccggatattgagccaataattctttgtttgtcaccttatccagatttttaatgctttctccaatcgcagtcagtttcatgcagatactatccagtttcatcataccgctttcactcaatagaaaatcatccggacaggagatatccgaaaaacgaaaacttattctttccagagatttctgtatcaaatccaatatatggaaagcgatcaacgtgtcatacataaatgccctccctctgaattctttcacgtaaaaatgaatccattctatctcgcaggcgtacaatatccactttgcagcccaataattcttccaactcttgctttatacccgctaaagcgaaaaagccatgcagctgaccttccacacacacatccacatcactattttcagtctgctcgccacgtgccacagacccgaaaatacccatacgcacaatgccatatttatgagcattctcagccatatacttacgcaataatgcaatgtattcagatgtcgttttcatatttttcctccaagtaggttttcgcaaatatacaatttatttttcttcagacaaaaatttctcattaaagaatttactcaaagcatccccattatctccctcacttttcccttccactcccccagttcacgttccgcctcccgtgacagcggcgggttgacatacctgtaaaactcgatacgcctctcatagtgttcttctataaccgccttcacctcgaaaaaaagaagaagcgtcatattattttttttcttccaggctggtaaaaaagccattagccacatggagcttacgctccaactcccgtctgtgcagattcaactggcccaaacgtttcactacctcggcagccaattgccgggcctgatcaacaggattcaaatgttccatcggattaaatcgtatttttttatatgaatactcatttacatgtcctcattcaggacaaaaacacacgtatctcggttattatatcgaactttgtaacattgaaaatcaataacctgattcataaatatcagggcttgcaaatttaataaataaaaacgaatgaaccaatttaaaatgtcactgtttctgccaccgatatcaccggtaaaggacagtgccaccggacgaaccgtccagccgcccaccttaacgccctacaaggaaataactttacaggaagtgtacaaacttatcacatccagcgaacgcctgaaaacactgaccgagaccgtgcgccgggcagcggaaaacggggatgaaaaaatctatcgtatgctcaagcagcagacactgccctacgttaccccctgcggtgtcttttcctaccgcaaaagcgacagcctgaccggaccgtcgggcttgattgtagtggacatagaccatcttgattcccgtggggaagcggaaaagctgaaaagacaattgttcgacgaccgcctcctgcaccctgtactggcattcaccagccccagcggatacggagtaaaagcgttcatcccctacgacctggcacgcatacccgacaccagacagaatacttccgaaaacatccactgggcgatgaactatgtacaagcgatctatgatttccacagcagccacccggacggggaagataagaaaacgaaccgctccggcaaaggcgtggaccgttccggcaaggacctggtacgggcctgtttcctctcgtatgacgaggaagcattgatacgccgggaaatttaagaagaatagaaaagcatactcaaaagaatgccggacaaaatttaaacaggcactcaaaaaacaacaaatatcatgaacatgaacaatcctttagaaaacttgcggcagctgaccgaagctgtccgcatggcaggcgcggatatcgctcccacctacattgaatatgtacaactggctttcgccatcgcaaacgattgcggggaagcgggacgcaatgatttcctttccctctgctccctttcctccaaatacgacgaaaaaaatgcacaagcactgttctcgaacgcgcttcatgccgataaagaagatatacatctgggaaccgtgttccatctggccgggcaatgcggagtgaagatttccggcagcaccggctctcacaaggcagggacaatggggacagcagggacagccccggattttccacacacgtgcgcgcgatattataaggtggaaaataacatttccgatgataccgacgaggaggaacagctcaccgaaggctccgatccttattcccccctgcctacctttccacagaactatgtgtggccggaactgctggagagaatcatctccttcggtaaaaatcccgaacagcgtgatatattgctcctgggagcgtttaccgtactgggtgcctccctctcccacatagtgcggtgccagtacggccggaagtggcaggccccctgtatgcagactttcatcgtggccccgtccgcctcgggaaaaagcgcgttgacatgggtacggctcctcatcgaacccatacacgacaagatacgcagcgaggtgaaagaggcgatgaaaacttaccgccgggaaaaggctgcctacgactctctgggcaaggaacggaaaaatcaggaagctcccgtattgcctcccaaccggatgttcctcatatcgggaaacaacaccggaacaggcatcctgcaaaatatcatggattccaacggaacgggcatcatctgcgaaagtgaggcggacaccgtatccaccgccatagggaccgaatacggaaactggagcgacacgctgcgcaaggcgttcgaccacgaccgcctgtcctacaaccggcgtactgaccgcgaatatcaggaggtgagcagaagctatctctccgtgctgctctcgggtacgcccgcacaggtaaagcccctgatccccacggcggagaacggcctgttctcccgccagaacttttattatatgccacgcgtcacccagtgggcggaccagttcggcgaggatgaggtggatgtggacgaggaattccgcctgatgggcaacgaatggaaaaacacgctggacgagctgacgcttcggggattgtttaccctgaagctgactcatgcccagcataaacagttcaacttcctgttcgacaagctgttccatcgttccggcaagatcaacggggacgagatgagcagttccgtcatccgtcttgccgtcaatgcgtgccgcatgatgtcgatagtcgccatcctgcgaagcctggaagacccttctctggtgaaacctgacgcgcatatttcttccgataatctgaaggaccgtatcatcccgcgctggaacctggcgattacagacgatgatttccatgccgtacttgccttggtggagccgctttatctgcacgccacccatgttctttcgtttctgtcctcctccgttatcaagcgccggagcacggcggacaaggatatgctctttgccgagatggaggacgagtttacccgccggatgctgctggaaaaagcgcacgacaggaggatacctgaatccaccgcgctgacctggctcaaacggctcaccaaacagggggcgctggtgagtgtggacggcaagggaacgtatcacaagaactgacccggctctctatatgtacacgcatatgtgtgtgaggaaaaaaggggctgtccccactgtccccgtgtccccgtcgctgctccgtgcggccgttgttcccggatagcaaaaatcgtttgtggcaattctttgggattgttcggaaaactccggataaactttatatacgacactccatgccggttagtataaaaacaatcgggcacgctttatgccgaaaggggatttgaataatttgcccatgtgtcaatgtaccgatttattaatttgctgctatgtgcaatttaccaatgcgccaatgtgccaaccgggccgcactctataccgtaggtgattggccgttggttcattatcatcatctatcaaactcacgttaaacaagaaaccattcatgaataagaccgaaacagcccttctctattttccggacagtacgccgaaagtagccgtgcgtcatctgatgcgctggatcgcccggtgcgcaccgttgctccacgccctggaagccactggataccatccctgtcagaaatccttcacctgccgccagttgcaactcgtctacctccacctgggagaaccgtgattccccctggaatctgccacagactgtccgagaactcttcctctctctttgagcgtggattacgcggaaagaataaagagggaagcgtgccccccctgaagtcaccacatgacgcaagtgctggccgagttcccggacagtttccccaaagggtcaaaaggggtcggaaggggtcacgccgcacggacgtgaagttatctttgcagtgtcagaaggaagaagccgcaacccggcacaagattacaaaaatcctggtacaagattccgcggatcttgtaccaagtttcaccgaacgccgcagcagtgtgcgccttgctcctacctgacacttttccgataataataaccctttaaaaacaaaaacgatgatcaactacagtatctcactccgtgccaatcccagtgaccaggatgctcccaagaaggcttatgccaacgcccagtactcagaaatcatgacactggacaagtttgccgagcatatctcgacccacggctccaaatacaaccgtgccgacatccaggccgtcctgatccaagcggtggactgtatgcgggagcagcttctggcaggacaacgcatccagatgggcgatctgggcactttctccattcatatcaacagcatgggagccgaatcactggagacatacaatcccgccatccatgtggaagacctgaacgtgcgctggaaagccgggacccgtttcctcagcttgctgaaagacagcgtattcaacctggtccctacccgaaaggctgccaagctggtggttaaagccctgaaagcggggaaaaacaccgtggacctgacgggagaggcttccggaccagatgacaagacggaagaaaacgcctgaactttccgggcttctgaagtctgatcgtattttgcctttctgaaatgaaacggttactctgaagtagacctgtatttctgtaaaaatctgcctttctgaaataaaactgttgttctgaacaaagtgaagaatctgaatgcaatcgtttttatgcccacagattcctcgtctttgtccggaatgacagaaaaaacaaatcctttaaaacaaatatccctatgaacaattcaaagaaaatcacctggaagcaaattctgcacgccattatccaagctgccatagcagcgctcaccgccttgggcgtaaccagttgcaccactctcttttaaaaagccccctggcccatcgcatgacactttttaatttttaattccctatttcaattcaaccatgattcaagaaactttccctatgataatcggtgaggaagagatcccgaacgaacgtgctctcctcactcaagaggacggcccgatgatggcatcctccgcttccgtgaaatatatcgtcattcattgcagcgccacacgctccacccgggattacaccgccgagcaactgctccgtgaccacaaaacgcgaggtttccgcacagtggggtatcatttttatatccgtcgtgacggaagtgtgacccagcaccgcaagcttctggaagtgggtgcgcactgccgcccctggaaccgttgcagcataggcatctgctatgagggcgggctggatgcggacggacgtccggcagatacccggacaccggaacagacggaacaatttattttgttgctgatgcggatggtgaaaatctttcccggtgtccggataaggggacacagggatatgccgggaagtatcccgaaggcttgtccgtgtttcgatgcggagggggtattcgggtacttggagaaataataaagaaagtagcaatcaccatgcagtttcttctttgggggaaactgcatggagaatgcccttacgtatgatttgtttttctttgtagaaaggttttacaataatgaatttactcaatctacagactaccatactaatcgtatacgatagccctatagagaaccgacattgacatcattctaatttaccctacccaccattcatctttctacaaaacagaagcaaatcacctagcagtacaatcaatcgtgcacaccgttacagcttatcaatttcttccgctgaaagtccggcaacccggacaatatccgctatggaaaaaccgttctctttcagtttacgggcgatttccaaacgctccttcaaacgtccttccgcctctccttccgcttttccttccgcttttcctattgcttctcctatcgcttttccttccgcgacagcctgttcacggatatcattttccacaatacggctcacgttataacggtccaccgccttatcataagcgatacggtcaccctcagacaggtgagccttggcggcaaggcggtcaagatggctgaaaacctgttctttcagcgcatcgggcattctgttccagttgttcatattcttcagtgcatacattagtttatcggataaagtagaacattcgtccagttccttcgtaaaataaggaaactggagataaatctgacggaaattccggttcaccacacgaccgctgtcccggtcggaaaccaccgtgtcggtacggaacttgctttccagaccatcctccttgaaattcatcaggaaaatgccgtacacggcaggaagcctgtaacggagaccgtaagaagcctcttcttccctgagcagaccgcaatccccctccaacggagtgtcgggaacacatacctctttagaggacggattctccatctggcggctcaccgcacggtatacataatagagcgtacggtccaggaaatggctgtgccaacgattctgcatctccacgatgatgtactcgccggtagaggtacggcagtaaaggtcatagatgatacccttgtcgtgaatattctccgaacggtcctccttgtccagaaacgtcaggtcttcaatgtgatgctcaccggacagcaattcgttaaacaggattatcagcagggccttgctggcgggctgtccgaagattatcttgaagccgagatccgtgaaagggtttacaaagcgggatgacataataaagatgattttatggtttctgaccgcaaagaaacgaattctatctggaaattcctatgaatgagcgctttttattattttaacgtgagttcgaaataaaatcaaaaaatagcaagttgtccgtcattgacaaactttacgtcaatggcgggctttttttcaaaaaagcagtatgccgcgatagccgacaaggagttggctataaagttactgaatgaacgatgtcttgagtgttcaatctgtgcgatgttcttcagttcgtcattgaccgtttcaatcaaggctctttttcttagcaaaatcttgtcggcaatactcatcagtgagttcctcatattatttttaactttagtaacaagttgtatgccattaaggaaaaggttttcaaacagagcctgacctatatatcccttgtctgcacatagttttcctttgatgttttccagaaacctaccctgtttcaacggttcccggtcatccacgtttccaggcgtgaacatgaaattgaggatttcacccttgtcattgattatcagatgcagcttgaatccgaagaaccatcccatagaacatcttccacgctcggcaagcccttcaaatgtcttatgaatcaagattctttggttacgacatacacataagggagtggaatcaacgaaactgatgccggtacaagttcccagcagtactcttttgatgaatatggtcatgggaagcaatacttccttctccagttccacaaaacggttataagaaacctgacgaggaaaaaggtgtttcagatgtttacagacatactccttgtagtaatgcttgaaacaacggaaaccaccggagtgaaacaggattagaataaccataatctctgcatcactcatacggttgggtttgttacgatgcatggtcttcatatccttaatcatatatttttcctgttgcaatgtaaattccttgcaaaaatcatcggccatacaataaatctctgtaactttagactctggaaacatagtggtaatcgtttaaatgttataattcagcactataaatttaatacttttatcgctatgtttctaattataagtgaaatatatttattcttatttcgaactcacgttattttaaatgaattttgaagactaagccaccggaaaagtacttgcaacggttcagttctactacggcgttgatgtagtctttccagaagctgtactcaaaaccgcagtttatcgatttgctatcgtattctgccatcagattcaagttatttaccgctttgttgataaaggaagtcggggacagagagaatcggaagttggcaccgatggcgggaccgttaaaatggtgcacattcttgttattccaaacataagcaccatgaatgccaagttctcccactttttcaaaattaaaatgcttcgttgcagccacataataacgacaaaagaaaccattgtatcgttggtcatcacttgacgaaccaccctcccaactccctgaagtaggatcattcagtcctaccacaatctgaggtgtccatgatttccaccatccttccttccaaactcttaaccgaccatgaaaggaacggtcctgatttacaaatttcccatacgtactcggtacccaatggtatatacccggcttggcttttaccaacacacaatcatagcctatttccaaccaaggaaatatagttacattaatataataattaatagtgtaataatttccccaccactcctgagaaggtataatttgaggactgagcgcactccctccaaacataagagtcttatcgcgctgcatctcggctataggcatctggagtaatccggtggttccatacatatattgggcatatacaactttcaccgatgttacaaagatagaaaataagattattattttcttcatctacattcttatttatttttggctaatgataattccaactctctttcgattgtggacattacctgagcgttccaccttgtacgttccttatcaaacagccatccccacttattaaaatatttaacggcacttttcatatgaattctcagcatctctttattcttataagattcagccttatgagcgtgcactatggtaacataaggccaaaacaatgttttataatatttatgaatacggcgagttatatcaatatcctccatatacataaaaatattttcatcaaacaaaccaaccttatgaaaacaatctatacggaaaaacataaaactacccaataaaaaaggtatatccattgctttgcaacgatcataatctttcaacaaaaaacgatgatcaaaaactttagctatcattttaggcatgaatcgtctaaatattaaattaacaggagtaggcagcaagcgacatacatattgtaaatctccattaggataaattgtattaggtatcaattgtcctacatcagaattttcatccatatatctacatattttctctaaaattgaaggttcaaaatacacatccgaattaagcaccaaatggtattttttgtctgaatcaagaacttgtctcaatgcttggttatgcccagctccatatcccacattatcactgcctatatattccacattggcatattgctgacaaaagtctgcaatatactgttgatgagaattgtcaataacataaatttgtgaaataaaagaagaggttaatgattgcaagcatttggacagttcttctagattcgtcttgtaggtgacgatagaaactgttatcatactatcaaatactatattttttctgtgacaaaatttacaattgaatgctcattataattttttaaaaaagactccttaaactgtttcctgtcatccaaactaatattcaaactatttatacagcatatataatcttcaggcacttctgcttctaacataaactttttaaatttcttatctatgccttcaaaagctatagaagtacccaatactggagtaccacaagctaatgactccacaaccttgactttcactcctgctccactgaacaaaggagatacaacaagtaacgaatcagcaatcatttgataaggattctccacaaatcccctgtattctacattcttatattccttcagccgtttgaccatttctacaggaagccctgtacctataataataatttttatagatttatccatataagcccccacctcttcaaaaaaccattgtagtccaactgtgttatcggaacgtgtccactttccgaaaaatattatttgctttttcagtctatgtggaacagcatttataacatctctatccaaaaaaaaattagtaacaaatgaattcctatgataaacggcttccacaatagccgcatccttactactgaaagtaaatataacactattgggaagggagagaactttcttttcggatgcaataacccacttccggttcagagtagtgccagtacgggaaaaacgctgtgccatcacgtcatgcgacattaaaattttattcatttccggaaagtattttccataaagaaacatctggctatgatccaaatatagccaatcataatgttcttccgatacaatttgtcttaaaaactccaacaactttctatcaaaccggacagaaaataacggatggataaatggatagcccccacaattttttaattttataattgtagaattggggcatactttcaatattcttacattgtcattaggagctacataatagggatctaaataatatttgtagtaaactaaatctatctgacagctaatagataactgttccaataaaagacgtgtgaaattctcacctccagcccgattactaggaaggtaaggagttaaaaaaaggattttcatttattattttttaagtaagaaaagagttcaatccatttacagcctatcaatcctatattatattttcctattttcattttcgcattttcacgcaaacgtgtaagttctctttcgtttttcatcatcatcaacaacttatcggcatactcattaatattaaaaggagcaatgatacatccatccttatcattctctattatgtctttcaaattaggataagaattaaaagcaataggcacaactccataattcatagcttcaagcaagactaagccaaaagtttcataacaagaagtcatacaaaggattgaagctgtttgataataagggatcggagatttaaaaccttcaagataaacattagaaattttttcacgctgaatccttttctctaataattttcgttccattccatcacccaaaattctcaaagaccactcaggagaaaaacctgccactttcttccaaatgtccaacaataaatctggtcttttttgatattccaaacgccctacaaaaagaacttctttcctcttactataaataagatcattagggggtattgtcaatggattgggaataattaccactttatccaaagaccctcgtgaataataatttaattcttttttgaaagattctgaaagtagaagtacagcatcactaccttctactatttgcttaaaataacagtgatatttgaaataaaacaatcttttcaatatagattttgcccaacaggtttccaatatatttaaaagcaatctattatgagtatgtaaattaggatgagtatacatgccaaacaatgtattgtgcattacactcagcaaaagcgctttaccttttaattctaccaaaggtaaagacgtggggaatatacctgcctgattgataatgatatcaatagaattatttaatataaattctttaaaaaacgcccaattttcttttctctttaatcctccatcttgaggtaaataaatatgatttaaagagtttttttctacaacacatttattagataaataaaaaatagtacaaccattctctgtaagccactttccaaggactatggacactcgctccacccctccttttgaaggattaaaaggctctgtaaaatagaataatattttataattatttactggaaccatgggaaataattcaatttataagttaaatcatttttcctatatcctataattttagcaggaataccacctactatagccaaaggtggaatattccttgttaccactgctcccgaagcaacaaccgcccctctacctatctttacacctggcaaaacagttactctagaagcaatccatacatgatcttctattattacatcacctggaatttcactatgctgattatcattcacgtcatgctctagagtccaaatatttgtctcttgagcaatatcaacattatcacctatcatcaatcgcccacctctgccatcaagcattacctctctattcaaaattacattgctaccaatagaaatattaaatggattaataaatctgacatgccgcataaaaaaacacccactccctatctttctcaaaaatagtttaataaacgaacgtctaatagtccaaataggaattgcaaaaaagaaagcagacgtcataagccacaaacctttaacaaacgatctcatcttatattttttctatgtttatcatttcccgactcatcgatatatatattaaagcagtcacacctataatactaaaagctgctatacaaaaactagaaaaagaagtagctaatataaaaaagaaagaaggtacataaagatataagctctctctattccaaaatcttaatgtacgtttgaatattccatatagcatacagaaatatataaatgttcccaaatatcctattgtggctaaattcaaatgatattgatcttctacaacaatgcgttccttgcttaaatcctgcatactcacaagagaatatcccaccccaaaaatacggctaaaagcggtattcaaatacatttgttcaacatgagcaaatttttcttttctatcttccattgtgttaacatccttcaatgttgattcttcctccttgccaattaagatatataaacgattctccatttgcaacatcattgtttcagccaatttaggctctttagtactcaaaaaagtatagattgaagttataacactccctgtaagaaatatcaaaaataaaaaactttttatattctgtttataatttctaacttctatacaacgaaaagacaaacctattcctcccaaataacaacacattgaaattaaaataatagctagcaatacaagacttgttccagaagcttgcatcaaggttcccaccaataaaataaatcccattataactttatgaattattgaaaaccgaaccaaaggataaaaaagtaacaaaagtattgcaaaacataaaagtactgtatctattgtaggatatcccacggttagtctcccccaataaatatgataatcgttccaaatgggtaatggtacaaaataaagaaaaatgcttattaatgtaaatccaaccatccctttcacgaaagtatttataagtaatggtactgttaagtttgatacacgctctacttgagaaaataaataaatgaacaaaggaaaccacaaatattgtttccatatttttaatccatcgcaatcaatcaatacaaaccctggaatagacactaaaaaagcaacaaacaaaataatactgaaatatttcattccattagtatatttcaattgtcgaaatgaaggatgtgaaactctatatactacacaaaaaagaatgactgcaactaaatattttatattggttaaactaaatttcattttgcccaatacttcttcaaaacagatacagtacaccaatataaaatacaaggcatttatcaccttagtcccaagcattttcgaacgcatctgaaaataattcttttatataaaacaatcttataatatacagagttttccacttcacatattctagcttcttcataaaaaactcttttccaatgtatttcagaaaaacctaatgtatcataaactgctatagggatattcaaagataaaaaacgccctcctgatttatatatctgcatcatcatattataatcagcgcaacacttataagataaatcaaatcttaaatttctaataatatcgccacgcacaaaaagagcctgatgacaaatacccatccctcttattttcttttttgaaaggtaaaaaggacactccttataatatcgttttttcgatatataatcttgatacacatccccataaattactgaacaatcattatattgacaattttcaaaacatcgggaaataacaaattcatcacacaaataatcaccagaatttagaaacaatacccagtttccatgagaataagaaactcctttattcatcgcatcaaaaattcctttatctggttcgcttgtccaacgagtgatatatgtatcatactttttaattatattcaatgtgccatcagtactttttccatcaataataatatattcaatatttttatatgattggttcaaaacagaacatattgtcttttccaatacattcacagcattataacaaacagttataatagttattttcataaatatgctctaaaataaatcttttcttaccaataacatcccccctccacactattggcatttctaggtttttcattttcttcaggtctgacccatgcatcattataaatggatgaaaattctctatcccatctcctacctttaataccaaaaagcaattgcaacgctccacctatatgcacagcttttttccctaaccgtttgacatgagcagctaaaggaaagccataagctccgcatcctaacaaacatatatcaaaatcatgtatttctatttctgctttcataaaatctaatgcatcaaaccaagatgaaaaagcagaatgattatttcctatgctttgtactgctttcacaacctgcaagtcaaaatccggtaatgtatcctgatttttccaaataaactgtcttttttcatattgttttttgatagtggaagtaaaaggatgaattattagcacctttttcccttcaagtgctttcgtccaaggatgttctgcgatatataattgttcaaacatcaaagctattttatatgaaaattcaagatattcatcaaaatattgttctgattttatccaagaagccaaaatatcaacctctttcatatcttcaagcatcaaattataaaaacgaataatattttcttgtgtgacaggataaaaacccgatagattttgaatattagtccaccaacccttatcaatccaccaacccactcttttcccttgaatataatcaagtactcctctgattccatcttgatttcctaattgtatttcatactgattagcaagtacactcatttcagtattaccaaagcgagcaatcatacatggcttatcagtttgaagcatatcataaatcaaattactaacattctctatatttctatcacacaatggcttatatgatccaggtttacctatatctatcattcgataagcacttctcttgtccaagaaaaagtatattttcctcaaaaatcttaaaatgagaaacctattaatatcttccaaattcattgtttattcaatttaaatcactatatatgaggttatcttttcaacttatttcgcaataaacctaatattcgaaaagggaatcttaatggtattaaagaccaaatttttatatatggtattttgagacaagattggttgcaaatgccattccatagtgagagatcattatgtatctcttcatgtaacgccttaaaagtgtaaaagtccaaagaggaagtcttatacaatagattcgcctgataataaatctgaagaaaaggaatgatggccttctgctgccaatataatacttctttatcacagctacattcttttgaataacgcctatatatcttaactatagcactcaaatttctaatataagattcaaattcaatactctggcctggccttcctaccacataatcatacaaaagacggtcataaataataaaacttttcacatactcaaacatatagatacttatctctacatcacaataagatattccctccgtcaaatgaattttccgtatgatatcagtctttagcgcaatacagtgaataaaaaaagaacaatcccatacagccttaatatctgatattctataactttttccaacctccatcttggtcaaaaacattggctctttccttttcccattatgaagaagacaattatatacatacatatcaacttccttcttcgtttttaactcttttataaaattttcaagttcccttgtattcaaccaatcatctgcatccaatatcaaaaagtaatcaccctgagcttcttttgctgctctatttatgcacgatccccagtttccattagctttatcgataaccctaaaaacttcaggaaaacgagtttcatatgtatgagctattttcaacgaacaatctttgctaccatcatttattacaagtacttcgatgttcattaagagagaataatcttcaatcaataaggactctagacaacgttccaaatattcttccatattgtaagtaggaacagcaatagttataattttatccataatcatagtcttttgaatactttattatcatcaaaagtagcctctaaaatgctacattttttctttatatatattccatcatttgttatcactattatcatccatcactttccaaatttctctctcaaaatcttccaaggtatcattccaatggaatccctcaaaaataacagaataacaacatacactattccccccatacttatcatcataaccagagtggcagtattccccaatccaagccacgaaataaaatataaacaaacacccataaccacacttcccaacacataatttaaatgctgccgtttcaagaaccgaataggaatatacctctttccgatgaaaaacatagaaaccgtaacagtcatttccgccaacatataggccactgctgtaccgttatgtccataacgaggtatcaataaaacattaagaaacacatttattatcgcaccaatagaagtacaaagaatgactatatttatctttcccaaaggataaagtacctgaattcccatcactcccgacaaccccaccgtcaaaatattaaacgccacaatctgagaagtcaatatggctggaacaaatccttccccactcaataataaaacagcgctaggactggtaaatatcaacccgaccattagaggcatagccaatgcaaaaataaaatcatacgacttttgaaccagcgccttgaattcatccattctctcttccgctatcaaattggaagtgcgaggcatgattactgctcctaaggcactggatatactcatagttataaccattattttagtcgctgccgtgaaatagcctaccgcctctgtgtctttcataaaacccaacaatacattattcaactgaagataaatactaatgatgacattcagtgcaaacacatacaatgccggctttaagtgtctcatggggcataacgtatgaaaactaaccataccccaacacaagtacttccgcaaccgaatgaagttgaaaatgtttccaccaagaacaccaagaacactatatgcaccataccataaaatatcctccttggtttttactagaaggaaaagcagaataacggaaacaaccttcactatcaaccctctaactgcaacatatttaaaatcctctactccttggtaaaaccattcacaacctatcgccgtaaagaatatggttgtactcaatagaagaaacaaaggaatattcgtctgcacctgaactaccgtcatacaaataacagcaacgaccaaataccccaatatggataaaaaagcatggagcaaaagaatttctaccgttgtccgcgtcatttccattgtattgtctcgtactttggctacctcacgtatggcatacatcggaatacctaggcaagtaaacaagctgatataggaaataatggactgaaaaaagttcacctgtcctataccatccgccagcattatacgagaagcgtaaggaaaagttataagtggaaataagagttgggaagcagaattgatcagattaaatagataatttgcttttactgatttcgtcattataaatataactcgctaatagaatattctgttttatattacaataagtattcaatttaaagcattcccttagcaagagaactaaatagtaccctaaactaacttatattaaagataatcttcgaaattaacataggcttgttgccccagtgattttctcaagaaccatatcaacatagtctctacccacacccgttaaatatattttttagaaaagttctaatgaaaattcaaaaagaaataccatgaaacctcaccgttccaatcacactataataaataacaaccatttttattcccacatcactagcataatgaagcgagctgttacgcaggatagttagttgccgaatgcttcgttcagcccaattattatctattagaaactccccatcgtgtaagaaagaaagatcccattccaaaaatgattcgtaagcactcaatttaaggtatccccctttgaaaggacacttttcagtgccctaaaccgagttttgttaattaattagtcttgaatttaacattggctggtagccaaagtgattttgtcaggaaccatgttaacataatccctgcatccgttaaagatatttttgaaaaaagttccgatgaagttccagatagaactaccatgaagctttaccgttcctatcacactgtgataggttgcaaccatttcagcaccggcatcactaccataatgaagtgaattattacgttgggtagtcagctttcgaatggttcgctctgccagattgttgtctatcggtaattcaccatcatcataatactcttcaattctgcatcaccccaaaagtctgtaagtacatcacgaccgcaagaaccattctcatagaagaaaatggctgttttccgagccttgttgaccagaaccccaatatagcacttcttatagtgatcaactacttttttccaggtatccttgaaccatttctgaaagatgttataaggaactttgtttttaacacaaaacgattggagagattctccataaggcaaggcctcggtctggtattaaaagtaaaacctttcaagatcttcactgctatacataaatcctaatttttttgttcgcagcgaagatagagatttcaatcaatagccattttttgacggcttacaacaactatcctccaatattctatttacttactgcaaataagcctttagccttttccatcaaatgaaacaatgataataaatttatcttatctttttctatttcttcattaatatgtttctctactacattattaccaaaatgtatataaccttcaatcatcttttccacaatggttcttattttttcagctccatcaagtgcattaaaagatatattattaataaccaacagtaaactttctatataatgatcatgatgaaattgatttgtcagaaataacaattgcctttgcgccctattcatttggaatatggctacccaaaataatccaacacataaagggataggtaaataaaaaggcatatattctattaaagaatgtggccaatcatcagcaatccatacccaaacacaaacaacttcccatactaataaaaataataccactcccaccatacttcttttgaaaatatggaacaatttttccaagcgttctttttctacatttatgggattaacatcacatgtcaagatactgaaagattcttctatttttttctttaaattactttgggcatcgctttgcctttgagccataaactgttcctcttccaattgctttttatagtgattataccaaattctatcttgaattttattatttcttttaaaagataaatcatcgacacctatttcttgagcgtatttatctaacctctgaagagcatcatccagttccttttcttttttatctaattgttctatctgctgtttataaaacatttccgagttgatatacattttaggctttcgctcattatacaatgtattttgcaatcctttaaaaatcttccgtaatttattgatacaaggtgcagtttcctgtatccctttctccatttctgctatattcctttctatttcattttgccgattgattactgtgcccattgttttatagcaagccttctcttctgtaaaaagaatactcacttcaaataaaagtgaaaataatgaatccaaatcatgattagaggatgataacttccctattctttgacaataactttccaaaagactacccaactctgcatgtttggagagagaataaatagtgaatcccttcattatacttaatgttaatgtcttattttgacataccctataggaaaagccacatttaagtgctcttcctataactttagcccaaagttaaattttcctttaatatttatttgggggcatcccaatagtaatcagcaatgaattattataacctatgcaaccgagtactgcctgtatgaaaggcctcttcaaatattgcagaccgaaacatcttgtacaaatcgatattatggtatacagctgtatactaaaatatattcatcatttattaattttcatatacaacattggacaattcaataaatccatcactccaccttctcaaacggaaaagcctgaagataactaatagccaccgtcatattaccaaaagcaaacaccagcttggtattccgatgcagacgcatgatacacccctccttcccttgaaaaacgccacccgtaatacgtatcttctgctttttctgaatatactcctcaagaggcttatccatcagttcaatgttataaggcatggattcatacagataaataaattcttccatctgtctatggggaataacagccacgctataggaattgcggtcttttgcaagatactgccgggggaacagatgggcaaggatgagattcaattcatccaacggggcacatacaaacagataaccatcacccgtgatttccttttcatccgtcaaagcgttcaacttctgtacagagcctgtcgcgaacgcctcctttacggcaaaggcggactcccgacgggccgcatattcttccttgctataaggacaccgttcaaaacgtcttttatggtcagcagaggtatatgaaaacactttgaagcagaaatatctttcttccttcatgccagaccgggtattaatcatcacagccctcctgccggtaaagatttcgatatagcgtttcagctctctgttgcgcaggaacatataataccacttgtgatcaggatattctttctcttcccccgtctgtgacgtggttatcagatctgacccctggtctgggcaggaagcgattgaactgcatggcagtaacctaggcgctttacccgttatgttttgattctgcggaaaggagtattcagtacccaaatccgcatcatgacagatttgcatcaaaacataaattatttatcatttgtacttctaaaatgaaggcttgttgaagcttcatttttggggttctcttagtaagagatccccatttctatttaatctattgataatgtgaaatatacatatcgtaattcataaccttttacgaacaattctcatacatttcttgttaaaagcattttaaaacaacaaaagatttccatttcttgggaattatagctacttttgcagccaaatggggatctcttactaagagaaccccattttttataaaacgaatcatgctatcaaacagctgattttcagatttatcacacttgttcatgataaaaaataaattatcctaaattagatatcacacgaagtcacacagtatttctctattgtacagccagcccgcatgatattctacatcgctgtttcgccagcaatgtagaattattttttcttgaacaaaatatcctgagatacaaataaagttacaacccttttaaaataatctgattggctctgtctatctgtgaagtggagatggatgccagataaatatgagtggtcttttcattatcgtgccccaacccttcgcggatgatgtctgtagacaccttcctgtcctgcgctatgctggcccagctatggcgcgccacatagaaagtcaacggcgcctttaattccagccgcaagcctattttattcaacccccgtcctatttgcttagccctcagtttatattgcttgcggtcatttatgtcacaataccgcaagataggcagcaggtactcggaattgtcatccttgtatttatccacaatctcctgcatcagctcctcccacagaatagtcagccgctgcccggtctttttccggctgtatgtcagaattccattctggaggttgctcttcttcaagtgtgccatatcaataaacgacatgccccgggtatagaaactgaaaaggaaaatatcccttgccagctccaactggggttcgaatgataaatcaagttccttgatcattttgatgattttaaagggaacggcccgttttacggtcttgtctatgccggtatagacatgtttgaaaggtttcttgtcggtggtatagccttgctctacagccagattatacacactcctccagattctcatataataggaagtactattctttaccaagcctttctctttcagataggcttcatacatctccatctgttccgaatcaaaggcttcaaaactcagatcctcattctttctgaattggataaagctgttcattgtcgaggtataaccttctgccgtccgtccccttttctgccgctccagtttattgatacatcgttgcatgaagttgaacacactctctacagaagggattttccggaaagaagccacgatatcatcaatggtgtattccacaccggtccgctccagatcattgataataccttgtaaccgcgtcatctcccaattcgtctggtcacgtatcagcagaagacgcgctttacattcagactgtgttgaaataagcagactgccggtggagtcgtcccactcggaaggcatgatccgataagaagtcttgatgagccgtgtcagtctgtaatgaataatttgataacttaatacgcccttttttccttttacgctcgatgggcggaatttcaatttaatggatgccatatttcttttctatattatggttttgttattcaaaacgaatatagcaatatggcatcaggtacactgttgcacctccggttattctatccttctatctcgctcagttccaaccagcgcatggtcttttcatcaatcaaatcattcagttccggcaatcgtttggatttctccgtcagttcctccactcccagcgtaccgctgcaaagggcggcttctatatcggccttctcctgctccagcccggctatttcttgttccagctgctcgaactctttcttttccttgaaagacattttccgcttgtcattcaggcgcacgcgggcggtcttttcctcttttggcttttccgcctctttgtcgcgctgctctttcgcctcgcgccagtcacgataatcggagtagttgcccggaaaatcacgaatgtctccctgtcccttgaataccagcaagtggtctaccaccttgtccatgaaatagcggtcgtggcttactacgattacacagcccttgaagttctgcaaatattcttccaatacctgaagggtgatgatatcgagatcgttggtaggctcatccagcaccaggaagttgggattacgcatcaataccgtacacaggtacaggcggcggcgttctcccccactcagtttatatacataactatgctgtgtttcgggagtaaacagaaaatgttgcaggaactgggatgcggtcagtttcttgccatttcccaattcgatgacttcggcaatatcctgcaccacgtcgatgaccttcatttgctcgtcaaacttcaggccatcctgagaatagtaaccgaaacggactgtctcaccgatatccaatgttccactgtccggcttctgttcgcccatcagtattttaatgaacgtggactttcccgtaccattgtttcccacgatgcccatcttctcataacgggcaaagatatacgagaaatcttccagaatcttcaaatcaccgaaacgcttgtacagatgatccgcctcaaaaatcttggagccgatgtaagaggctttcatatccagtttcacattgccgtcgttgaaacgctgcttcgccactttctccagttcgtagaaagcttcttcccgataacgcgctttatgtccgcgtgcctggggcatacggcgcatccactccagctctgtgcggtacaagttattggcgcgggctatttcggcattggtagcctcgatacgctcctgcctcttttccaagtaatagctgtagttccctttatatgaatagacctgctgattgtctatctcgataatttcagagcagacgcggtccaggaaataacggtcgtgcgtcaccatgagcagactgatgtttccccggccgagatacccctccagccactccgtcatatccagatcaagatggttggtaggctcgtccaaaatcagaaaatcgggctcggttatcagcacattcgccaaagccacccgtttcaactgacctccggaaagatgtttgatctgctggctgaagtcccggatttttaattgagaaaggatttgtttcgccttccgttcataatcccatgccttttcgtgctccatccgtgccaacagctcttccagtcccggattgccttcggtttccatgcagctttcatattctttgatgagttccaccgtgctgtttccgtgatagaaacaggcttcgagcacggtcaggtcttcgggataatgtgggtcttgctccaaatagcccacccgcaaatcacgacgaaagacgatgcttccttcatcatatccctccttaccggctattatattaagtaaggtagtcttgcctgtaccgttctttgctatcagaccgatgcgttgtccttcggccactccaaatgaaatcttccggaacaataccaagtcaccgaatgacttggtaagcccgtctacttgcatatatggggtcattatttgtctatttatttaaatcatccaacactgcctccgcctctcgcttaattttcctgaattcggatttcaagtcgcagggaagtccctttttagcttgtccccacaccagtgcggcagggtccagcaccatatccgaacacataaactgcaaggcgggatattctttctgtccctcaatgacagtcacccattccataccttccatctcattcaccagaatggctccgaaggcaataccgaaattctcccacgccatacgctgctgggtctggaaacgtccgctgtccattacctgctgtatactgtcaatatcgctctccgacgcagtgaaatccttggtgagttgctttttaatcgtggtagaagcccactcaaaggcggtgttcacctccccgatttccaagacacggatcggaatgatctcacgcgggtgacttacaccttctttgcggatctgcaaagaccggatgatttcttctgccggatgcttgtcacctcctttggacacggtaaaagaacattcgaaagaaagatccccctctcctgtcacccagatatgagtggtgtaccaagcgccttcttcctgaaaagtttccgcgctgtaagcacaatcccacttgcccactttcaccagggtggaagaagtattttctttcaattcgtatgcgatgcactgcggaccatagtcagccgcttcatccttataggccgatatgcggaaattacctgtccaccggtcaggattatagaataaaaaactctcttctgtatcttcaaactcgtgccagcccatcgggtattccaatgagaaccagccaccgggagaaatgtatttcatagtctctatctttttaattcattactaacggaaacgatcgtcttactttaccggcaatatctcaatccagtaatcatcaggatcattgatgaaatacaagcccatagcggtgttctcgaagcaaacgcatcccatttccttatggaatttacggacttcgtcataatcaccttccacacgcagacacagatggctttcgttctcacccaactcgtatggctgggtatggtcacgcaaccaggtcagttccaacaagaaattgctgtggtcatcggccatatacaccagcacgaaggaaccgtccgaagcttccttacgatgagactcatgcaaacctaacgctgtttcataaaacttgatactcttgtccagatcagttacattgatattgaaatgatcaaatcttccttttactttcatattgtgttattcttttgttattcaatctctattttttgtccgcgatgtgtcaatgacacaaaacgcactccatgcgcttcggcaaagtcgcggaaagcatttgccttggcatactccggtgtgaaatgcatgggtacaaagatatgagtttttatctttgttacaaactgtccggcaccccgcatgtattcttttcccaaacgggggtcaacgggaaacatcgccacatccacttcgggcgtataggcgtaaagatcatccagctcatgcaggaaattcttctcggctcccttccactccgcctcggtactctcgtccatccaatgccagttattcaaatcaccggcatgaaaaatcttttttccacttgcctgaagcaaaaacgatactcccacatccgtggaaccgaaagcacgcacgctcaatgtttcatccttatattcctctccttttttcagccagacggcatcttctttctgcgccctgcgatgacgcaaaatgtctttcgagaaaatatagataatatccggccgctgttcacgccattgcaatacctctttattaaaatgatccggatgaaaatgactggccagcacatacagttttccgggtctccgcaataattcgctgtgtacggttccttccggcattcccgtctcttgattgctgaaagtcccatccatcaaccggttcaaatccgcctgcgcctgtccatcctccgaatcacggtaataatccatgattacagtaaagccatcgcctgacaaggcgaatccgctatgatatatataagtaagttccatatccatacaacaaatttatttaccgataggttgcacctgcgcacgggtctttttatcaatctccagaaacatataattcactttacccgaatgtatcagggagtcattctcccggtatttcctcgtagcgtattcctttgatttctcgtaggtcagtttcgacatctggttctgggatttgcccaccatggtagaatccagcttctcatccggaaagaaatcatccagattcacatcccctatcatcgtggtttccagaaaattcatattcttatgtgatttgtctgtgtaataacccacaaacatatgtcccggaatacgcaccaggataggattgatattgatggctttcatcagtgaggccagcaacacgctgccatccacacagtttatctgcgaggattccagcgcatcgtccaaggtacggacgcgctgtgtataaaccacattggacgaaagactggtattggtggtggagctgtacttaaagttccgcttttgcaacacattccacaatgcatagacctgtttgtccacattctccgactggtgtgcattaccttgatacccaagaaaacgattgacgatacgtgtatccaaggcttcacgcaataatttgtcaatctgaggatgctcctcgttgacgtaggccgcaaaaaactctcccgtatcgtgaaacttcattttatcgtccacatatcctaaagggcactcattgatactgcgcatcgagatggttttcaaacgctgtggaagttctttcttattcaattccgccttgacggagatgctaacgggcactgcctgattattatcacgcaaagcctgatagttccatataatatccgggaaaaccagatattctttccccgccttgggtaaaataaactcagatacagactgagagaaaaaaggagtctcggccacttctatacgcaatttgctattggcataactgttcttcagccggatggcgatacacgacttgggatttccgatataatcggaatcggcaggtacgattaaactggcatctgtggttgcggtagaaagaatggttgcagggaaaatattaccacccagctggtcggtaatctcgaacccggatttaaaaggctcataccgataaataaagactgaaaatgccattaccagtatagcagataatattaatgtggaccattgccacttgttcagttgtttcatattccacttttctacgctatctgttaatcagttgtttttatgattccccatccaccatcattcactacagactacactgattgacacaggttccatatcaagcaattgcttttcaatagaaataatctgcatcaatccgtgcaatcggtggcgaaaagctcgttatctcactgcgatactctctatctccacaagcgctcctttcggcaaagccttaacagctacagcagaacgggcagggaaatctccttcgaaatacttggcataaacagcgttcatttcagcaaacaaagacatatctgccaaaaatacggttgtttttacgatattagcggtagtcagaccggcttctgccaatacattcttgatattctcaaaaacctgggtagtctgttcagtcactcctcccggaacaaattcaccggtagcaggatcaacgggaatctgacctgacaggaataccataccattcacttcaacagcttgactgtaaggacctatagcagcaggagccttttctgtaaaaatcacttttttcatcttttctctatttataattaagtaaaaatcaaatttgacgggctaaattagtatttttttcgctatttcatgcagactctgctgaacaatctgacctatttttacgttcatttaacatcagggttttcacagacagaaaggatgtttccccacgtcgttttttttattaatttcattaaattcggcaaaaaatcttctgtaatatgcatgagattaaaaaaaaatatctacttttgtcctcggtaaatacgtcagttccctatccgggaaagtctgtttacttcctgataacaatcaaaacaacatcaatcccataatcgtaattatgagtgcatttcccccttctaacacatttttgtgtagattgcgctccttaattataccattaaaagattataaagaaatatattactaataactatactctatgtataacattattcaattaaacgacaaagacttgtcggaattacaatcgattgccaaagagttgggtatcaagaaaacagactctctaaaaaaagaggatctggtttataaaattctggacgagcaagccatagtcggagcaacccaaaaagtagcggcagaaaaagccaatgaaagtcaaccccgtaaaagatcacgtatcaacgttaaaaaagacggtgacaaggtctatactgcaaccaaggacaaggcacagaaactggaagccaataccccgcagcctgccgccgcagctgccgaaacagtaaaagagactgctcctgtagcggtaacaccacaaacagaagccgtggccgaaacaagcgcggaagaaaaaacacctaaaaaaagaggacgcaaaccgggtagtaagaaagtaacagccaaaacagaagaacaacctgcaacgaaaacgaaagaaactgcaaaagaggaagtgaaagctgaagcaccggcgaaaccgacacccaaaaaagcaaaaaaagaagaaacaccggctattcccgaagaaaaagaagtgattcttcccgaactggaattcggcagtgaaaccgatgattttattcccatcgaggatcttccttcagaaaaaatagaacttcctactgagttgttcggcaaatttgaggctaccaaagtagaaacaccggctccggtacagacacctgcccccaaattccaaccacgccagcagcgcgatcaaaatcagaagtacaacaatccgcgcaacaataattacaacaatcctcgtcaggcaaacaataataacaatacgacggctgagggagaagcgtctgccagcattcctcaacaaccggaacgcaaacaggtggaaaagccttacgaatttgaaggtatcctgaccggtaccggggtattggaaatcatgcccgacggatacggtttcctccgttcatccgattacaactatctttcctcacccgatgatatttacgtttcacaatcgcaaataaaactgttcggtttgaagaccggtgatgtagtggaaggctctatccgtccgcccaaagaaggagaaaaatatttcccgttggtaaaggtggaaaagataaacggtctggatcccggattggtacgtgaccgcgttccgtttgatcacctgaccccgctgttccccgatgaaaagttcaaactttgcaaagggggatatagtgataacctttcagcccgtgtggtagatatgttctcacctatcggtaaaggacagcgtgctttgattgtggcgcagcccaaaaccggtaagacgatcctgatgaaagacatcgctaacgcaatcgcagccaaccatccggaaacgtacatgatcatgctgcttattgacgaacgtcccgaagaagtgacagatatggcgcgcagcgtaaatgccgaagtgatcgcttctacatttgacgaaccggcagaacgtcacgtaaagattgcaggtatcgtactggaaaaagcaaaacgcatggtagaatgcggtcacgatgtggtaatcttcctcgactctatcacccgactggcacgtgcatacaatacggtttctcctgcttccggcaaggtattatccggtggtgtggatgcaaatgccctgcataagcccaaacgtttcttcggtgctgcccgtaacattgaaaacggtggctcgctgaccattatcgcaaccgcactgattgacaccggttccaagatggatgaagtaatcttcgaagaattcaagggtacaggtaacatggaactccagctggaccgcaacttgagcaacaaacgtatcttcccggcagtaaacatcgtggcatcaagcacccgccgcgacgacttgctgctcgacaagactactttggaccgtatgtggattcttcgcaagtatctggcagatatgaatcctatcgaagccatggatttcgtaaagagtcgtttggaaaataccaaagacaacgaagaattcctgatgagcatgaactcataaaaaataaatctcttttattaaatgacgcaggctataccttttcattaaggtatggcctgttttttattatacttcaatcaatatatcaatgcatcaatttgctaatatgcccatgaccacgcagagtagaatgcagcaaattgacacattggcaaattatccaatgggtacaaaacctgattccttccgtctgattaaaaagacctttaaatccggagaacccatgaaaacaaaaataatctgctttatcgcatttgtcagttataccttttatttaaccgcaggagatatttatgtttctccctacggtaacgacaatgctgccggtacacgccaatctcccctccagactctggaacaagccatcaagcaagcgcgcgaatggagaagattgcaatcacccgaaacaaccggaggcataaatatcctattggaggaaggaatatacccacaatataaaagcctgttcatccgccccgaagatagcgggacaacagactctcccacccgtatcaccgctgttcccaatgcccgtgtagtcttaagtggcggagttcctgtgacagattgggaacaaggatgcaaagataccagaataccagaaacacttagaaataaaatatgggtagcggaagcgccccgtatgggaaacaggatattggaaacccggcaaatgtgggtcaacggaacaaaagcacagcgggccgcacagtttcccgacggagtaatggaacgcatgattgattttaaccctgaggaagagacgatcaccattcccactccacaaacagcagggttgaatgccgcttcacaagtagagatgatcgttcaccaacgttgggccatcgccatactgagagtgaaggaaatgattactgaaggggcaaatacaatcgtccgttttcatgatcccgaaagccggttggagtttgcccatccctggcctcaacctgtcattgacggagaaaaaggaaactccaccttttgtctggtcaatgctctggaactattggaccagcccggagaatggtatcaggattatccttccggacgcatctattattacccgcgtcctcacgaagacatgacgaaggcgcaagtcattattccggctttagagactttactgactataagcggaacattagaacgcccggtaaggaatatatattttcaaaatatatctttcgaacatacttcatggatgcgcccctcttatcaaggacacgttacattgcaaggaggcttccatctgctggatgcttacagactacccataccggggctacccgaaaaagcggaactggaaaaccaggcatggataggcagacccgaagctgcaatacagataaaatgcggcaataacataaacttcaaccactgcacattccagcatttagcagccaccggagtagattatgaacgcgccgtatcgacttccattgtcgagaattgccatttcaccgatattggtggcacagccttactggtgggcacctttcccgatgaaggatttgaaacccatgtgccttatacaccttttcatgaacaggaattatgtacgggaatcaccatacggaacaacctgattgaggaagtgaccaatgaagattggggaggtgtaggcatcggagccggatatgtaaagaatatccatatcgtacataatgaagtctgccacgtcaattactcaggtatctgtgtgggctggggatggaccctgctggaaagcggaatgagcggcaaccggattgaagccaattacgtccaccactttgcccggaggctgtatgatgcaggaggactttataccctctccaaccaacccagctccgtaatgcgcaataaccggattgaacatttaattgacgcgccctacgctaccaacgaccgtgcgttttacatctactttgatgaagcgacggatggctataccgtagaaaacaactggtgtccgtccgaacgtttcgactccaaccgtccgggacctcataatgtgtggaagaagaatggtccgcaagtagatgaaagtataaagcaaaaggcagggagggtcgctgtaggtggggtgtcacaaccaagaatcattataaaaacaaaataacaaaaagagaatgaaaccaaccaattaccacttattcgattttctggactttgatcccgatctgtcaagagacgaatcattatggaaagcatacaagcccacctctgtctatgaaaaagacggggatatctgtataaacgtcccttttcaaaagcaagtgctctctaacgatatggcacccgatacggcatcgccccgtgaagaatatacgctggtcatccgtcagtacacctcaggtatcacccgactctttatcggattcggtgaagaaagcatgacggatcagtcggaaatgctccaattcagtgaccgggtaaagaaactccctttgcaagtgacacaaacagaaggggaatggttgatcactacccaagacggaatccaacgggcacttatccatgtaaagcccccggtactggaccgttggagcgaactgctgcccgatcctcaagagaccttggatcttcgcctttaccccgacggcaaacgtgaaatccgactggctgcctacgaccacttctcccctccccgttacgatgcactgccactggctttctgcaaacgaaacggagtgaaggaacgtgccaccctttcctttgaatcaaaacccgatgaatgttttgccggaacaggggaacgctttgccaaaatggacttaagcggacaaacgttcttcttaaagaaccaggacggacaaggtgtgaacaaccgccgtacctataagaatattcctttctacctctccagccggatgtatggaacattctatcacacctgtgcccacagcaaactgtcactggccgggcaatccacccgctcggtacagttcctgagcgaccaggccatgctggatgttttcgtcatagcaggcgacacgatggaagaaatcctccggggttatcgggatctgaccggatatccttccatgccccccctctggagtttcggcatctggatgagccgcatgacctacttcagcgctgatgaagtaaatgagatatgcgaccggatgcgtgccgaacattacccctgtgatgtcatccatctggataccggctggttcaagaccgactggctgtgcgaatggaaattcaacgaagaacgctttcccgatcccaaagggttcatccaaggactgaagaaaaaaggatatcgcgtgtccttatggcaactcccctacgtggcggagaacgccgaacagatagacgaagcacgcaaaaacgattatatagctccgctgacaaagaaacaagattcggaaggttccaatttctccgctttggactatgccggaaccattgacttcacttaccccaaagcaaccgaatggtataaaggactgctgaagaatctgctggatatgggcgtgacctgcatcaaaaccgattttggagaaaacatccacatggatgccctctataaaggcatgaaacctgaattgctgaacaacctgtatgcattgctttatcagaaagccgcttatgaaatcacaaaagacgtaaccggtgacggcatcgtatgggcacgctcggcatgggcgggatgccaacgctatccgctgcattggggaggcgactcatgcagttcatgggatggaatggcaggctcgctgaaaggcggcttgcatttcgggctttccggtttcgccttctggagtcatgatgtccccggattccacacattgcccaacttcatgaactctatagtggacgatgatgtatatatgcgctggacacaattcggtgtattctcctcccacatccgttatcacggaacaaacaaacgcgagccgtggcattatcccgctatcgcacctatgataaaaaagtggtggaagttgcgctatacgcttataccttatatcgtagaacaaagccgtaaggccatcgcaagcggagcacctctcttgcaagctctgatttttcatcatcccgaagacaaattgtgctggcacatcgacgatgaatactatttcggcaacgacttcctggtagccccggtcatgaacagcgagaaccgccgggatgtctatctgcccgaagggaaatgggtgaatttcttcacaggcgaacgcttggaagggggacgctggctgaagaatctggatgtccctctggacgaaatgcccgtatatgtacgtcaaggagcgaccatccccgtttatccggatgaagtggaatgcacggacgatatggatttaagcaaaagcatcggtctgcacatagaccctcattttaaaggaatatttaagaactgacgaatatggaaacttggaaaacgaatttagacgagacaaagaaacgatatatagattggtggaaccataaaggaatcatactgaacatgtgggagcactttcaggaaggtgtgaaacctcatgcggatatccctgcaccctccccggcaaaagacctgaatcagaaatggttcgatccgcaatggcgtgcagaatacctggactggtacgtggcacacagcagtctgaaagcagatatcctgccggtagccaatacccagttaggtcccggttcattggcagccatcttgggcggcgtgttcgaaggaggggaagataccatttggattcatcccgatcccgatttcaacgatgagattgttttcaatcccgagcatcccaactggctcttgcataaagaattgctgaaggcatgcaaggcgaaagcaaacggtcactattacgtaggaatgcccgatttgatggaagggctggacgtactggccgccttgaaaggtacagacaaagttttgctggataccgtgatgcagcccgaagtgctggaacagcaaatgcaacaaatcaatgatatctatttcaaagtctttgatgaactttacgacatcatccgtgaaggggacgaaatggctttctgctatttttcttcatgggctcccggtaaaatgagcaaattacaaagcgatatttctaccatgatcagcgaagatgattatcgtcgttttgtacaaccctttatccgcgaacaatgccaaaagatagactacaccctgtatcatctggacggtgtgggcgccatgcaccatctgcccgcccttcttgaaattgaggaactgaatgccattcaatggactccgggcgtaggtgagccacaaggaggatcacccaaatggtacgacctttacaagaagatccttgccggaggcaaaagtatcatggcttgttgggtaaccttggacgaactgaaacctttgctggacaatatcggtgcggacggtgtgcatctggaaatggatttccataacgagagagaagtggaacaagcgatgcgcattgtcgaagaatactcctcttcttcctctgacgtatccaaagaagacctttcgaaagaagaagccgctgcaaccaaacaagaaacaatcgtcgtcaaagactctgcggcagccgggaatgaagccttgaaacctttgttcaatgccattgtggacggaaagctggaaccggccgtagaagtaaccaagaaagccatcgccgaaggagtacagccccaggaaattatcaacaactacatgataaaggctatgggcgaagtgggacaacgcttccaggacggaaaagcgttcgtgccccaactgctgatggcaggacgcgccatgaagggagctttggaacttctgaagcctttactgcaagggagtgcctcgaccaccataggcaaggtggtcattggaaccgtgaaaggcgacttgcatgatatcggcaagaacctggtggcttccatgctggaaggttgcggctttgaagtaatcaacataggcatagatgtatcttgcgacaaatttgtggaagaagtcaagaaaaacaaggcagacatcctgtgcatgagcgccttgctgacaacaaccatgacttatatgcaggaggtgatcaacgctttggaagcagccggtatccgtcatcaggtaaaagtgatgataggcggcgctccggtaagccagggatttgccgatgaaataggtgcggacgggtatagcgacaatgccaatacggccgtagcggtagccaaggaactgatggggcttcataaataaacggaatattcatcttaatctgatacatgaattatgcacgctaattatttagatacgttagattggggcattcttattgcctactttctgattcttataggcatcggtatatgggccagcctgaaacgcaaaaaaggcagcagcctttttcttgccgagcgttccctgaagtggcatcacatcggtttctccatgtggggaaccaatgtgggcccttccatgctgatagcctctgccagtgccgggttcaccaccggcatcgtttcgggcaattatgcctggtatgcgtttgttttcatctgcttgctggcttttgtctttgccccccgttatttgggagcgcgtatcaccaccttgccggagttcatggggcggcgtttcggacagtccacccgcaacattcttgcctggtacaccattgtgacgatccttatctcgtggcttgccctgaccttattcgccggaggtatccttatccgtcaggttttcgatattcccatgtggcaatcggcattgatcctgctcgttatctccgcattcttcaccatggccggagggctgaaagcggtagcctataccaatgtgttccagatgcttctgcttattttcgtatcggccacgcttactatagcagggctttacaaggtgggtggagtcagcgcattggccgaagcggttccggccgattactggaacctgttccgcccgaatgacgatcccgccttcccgtggctgcccatcattctgggttatcccatcatgggagtctggttctggtgcacagaccaatccatggtacagcctgtattggctgccaagaatctgaaagaaggccaaatgggtgccaacttcaccggctggttgaagatactggatgttcctctctatatccttccgggtatcatctgtctggcactctacccgggcttgaagaaccccgatgaagcctacatgactatggtcactaacttatttcctgtaggcatggtggggttggtactggccgtattgaccgccgcactgatcagcactgtcggctctgccctgaatgcgctgagtaccgtcttcacgatggatatttatgtcaagaaattcaggccacttgccagccagaaagagatcatccgtacggggcacgtggttacagtggcgggagcactgatttcggtgatcatcaccattgccatagacagtatcaaaggattgaatctgttcaatgtattccaatcggtactgggatttatcgcaccgcctatggcggctgttttcctgttcggcatcttctggaaacgaactaccacgatggctgccaacatggcattgacgcttggcacggcgttcagcatgggagtgggcattctctatttatgggtattccctgcggaagaatatacgacatggcctcatttcatgatgctgtccttctacttgttcgttatcatcagcgcaggcatgatcttggtatccttattggataaacatcgacaagaatgtacattaaatatgaagaaagtcatggagaagccggctaaatccgttatccttgcatgggcgttactggctattgtcatggtcgggctttatctattcttcaatgggcattaaaagaaggtgcagaaggctgaaaagattgtatttttatatgcctgcatttggtattccacttgggtggtgaggcagtcccaccccggtgagattgcagctccaccccggtggaactggagtttcaccggggtggaatatcagatgaaagtggttgttataacagatggaaatggctgttataccctgtctgataggacaggagattcattaaggttgcaacaaattgcaaaatcagtgaggttaataacaacatctagccatttttggactctgatttttgtagtcatcctattatcctcgctgcttccgcctgtaacatttatcgtacgtacagagaccgcaagtatattccagcttacggacatcctcccccagccctattactccactgaccgattttataggaagcatcaaactggaatctgtcaaccggatgccgcaaggttccgccgaagggaataagggaaataatttcttttgttccgacacatgccagccgcaatatccgggactgaaacggttggtatgcttccaccccctgttgcggatgtattcatccaaagcgatttccatacaatccgcagtcttctcggctatgatacttcctatagcatccgctatataaatctttaccatatccccttcttgctgcaacgtatgctggagcctttcaaaaccgattccggcagtcgcggcaaagaaagcgaaggattctgaaccacgcagctgccgggtgattattttacctatactgaaatacgtatcgccgacagaaagcgagtctttcgattcatccaactctccaccggatatgaaaaaacaaaaacggggagaagtaactgcctccacccgttccagtaccccacggacttctttttccaccgcttcgtcgggcacagcatctgcatatcccatcgcctcatagagttcggacaatgagataggcagatcagcaaaagaaagttctttttcaagcattattgaatccatttaatgcagcaaagaatgcatcaatattttcagatggcgtatgaggcggtgtatcacatccgctggagagcacgaagttgggatagaacttggtagcctccaacaggtcgagtgtggctttcttcatcacctccggagtagcagccttgaacaagctcaccggatcaagatttcccattgcaagggcatcggcaggtacttctttcagagcttcgaccatatctattttatttccaaaatgataagcggcagctcctgtagctaccattgccttggtacaatgaccggtatttccacaattatgcagaatgaccgtgaagtgatcgtcctgcactttctctacgatctccttaatgaaaacagacgagtattgcgtgcagtcctcatcggacaacagtccggcagccggctcggccatcactaccccattcactcctgtggccttcagtgccatgcagtaacggagaatgaaatccgaacatttcttcaacagcgaattggctgcttccggattgatataaataagcatcatgatttcagacatgtcatacaaacgtcctgccaatgagtaagggccgatgcaaccggcaaagacgggccggtccgtaatggtcttggctgccagcatatttgctttcagatactgggggattcttcctttattcaaggcagggatttccagtttgtcaatagcttcttcatcattgagaagacgccccaccacactgggaacctcattttcggggaagacaatctccgctccgaaagcctcggcttctaccgtcaaatccataatcacggttgcggcggctgtgggatatttctcactcaatgccttgatggcgttgtaatgcacttgtccgtcagtaaccgcatcgcgcaccgttttccctatcatctctatgcccggatgggtcatgatgggcatagccaccacctctttcttttggataatttcgtttatccactctttcatattcagtttactcatggtcttttattctttatttattctgttattgcaaaagtaagtcttttctttgataatctgctgtcccctttgctctttctcattcaaaaaagcggtataaatcccgttacaatactacagggatttacaccgtttttcatcttatagacttatggcaatttatgcaaaagatgacgatagtatgtttcaacatctttccaatggtagaaaggagcaatatccgtttctacagggatggtaacttctttctcgcaatgcatgaacttcaccagtatatcgtcagaagctttttttctgaagaaaaccaactggacgtttgccgccatcggagtgaccttgaaattacaccatgcctgatagaatttatcgggatccgtttcggctttccacatatcgcccaattgaagcaacgctaccaagggaatgatatttccatcgtgcccaaaacgtaatgtcgccgcatgggtcccggatctgatcgcctcatcggccgaatccaatatattttcaagcaatgaccgggcactggccgtcattattccaccattggcaggcgcaggtccgtcacatacataattatgataattgcaaacttgccaaagatcaaataattcatctttctgaaatacatcataaagactcacctctatctctacattctgcaaatctgaagcaatccaataaagtccccacatcaattcatcaggattcacattcttacggatatagtcaggactattaaataaggaagtgaccagacgatcgggacgggtatgagcttctttaaactttctatattcctcataccaaggtccctgatgagaaacaaacttcacggcttccggcgtatgataattcatatatttcatatacctagcacaagcttcgcgccggatctgcaatgccggattgagttctttcaaccgttcacaaaaggcatccatactcaatacacatcgcaacaccacggtagagcgtgcagacagagcaggagatcccttgaatacctcgggatagttctgaaacattctttcggctatcccccggtgttgcctcacacccaaaggagtcaaatctcccccatgtccctcggcatcttcccacaccaacgccattcttttgcggacatcttctcccaaagcggtcaaagctccggcttgatgcgctttctcgaaaatatcaaccactgtcttataatcctgttccgattgaatccatctggaaccgtgtcgtgcataatgactgatatagaacggtttataccctttaggcggaggagtcgcgatagcttcctttacaggataagcatagtacactcctcccgtccgggctatatcttccaatatagcctcacgggtggactgggcaaaaccattcaggtgaatgccacacagacagaggaacaggacactatatttaaaaagcaccagtgttttcatattcattaattatatccctcattctgaccaaattcatccggattcaagatagagtccagaaacatctgaggaataggacgccatgcatgatgcggttggatcaaaggaatatccggattatgagctttcacatattctaccaattttccggttctcttcaaatcaaaccagcgcataaattcgccgcaatactcacgtgctctttcttccaaaataaagtcgatcgtcatcttgtccactcctacctccatttcagcttccttgcccggtacagccgcacgtctgcgtatgtcattgatacgtgctttagctatctccttatttcctccggacttcatgatctcacattcggcaacaatgaaatacatttcgggcaaacgcatggtaatcacatcatttgcacctacctgcgaattggtaggcaatcctttgttttcaaaattcgcatcttcgtacttcagcaaggtcgggaagtgaatgttaaagttggcactcttgctgacacttccatcggctgcataggtatcatcgatatcgacgacagcgtatggcaagttacgtttgtcggcaatcttcttcttggtgaaaagcagcgctgtttctcccggctgaataacctgaccaatcatagatgacggtttttcaaaatagtccaactgatccttagtccaggcataagctttgggtgtattcagtttatactcttcacggaaccaggcattgtaacgggcatctatattctcattatacaattccaacaaataacgggtaggcatcatcgccatactgcccgacttggcattcttatcatttccatattcataatcctgcaccatacctgctcttgccgaataactggcatggaaatacatatgcatacggttcgggtttttagcctgcatattcaatgaggactcggtagagtgggtcacaacgaacatagcctctttattcgttttattattatccggatcaaagacttcgtcaggcgtatcatacaaagatactttcaacgcattctgattatcaatcacatattgagccgcatcctcagcgattttataatatttgtctttgtctgcctgactgtcacaataggaaacccgtgtcagtgcgatgcgcgctaataaaccataagccgcttttgaggtcgcacgacctacatctttaacaggataaggatcaacgggcagattatccaccgcattctgtgcatcggccagcattaaatcatacaaatcttcatagctgctgcgataacagttcattgaaagactttcggcagaagtttctttggttctaagatccacgttaccgtaaatttcaaccaaatgccaataagcgtaagcacgcatgaaacttaattcaccaaaacggatatctctcagtttcttgtctttgaattccacttggtcaatccgttccaaaccggcattacagtcgtttataatttcatacagacgattccacgtattcttaatctgaccaaccgaagctgtcaattcttcatatttggacatctgacggccataaccgcaattggcaatattgatccaaaggtcgccaccaccgttcagtaataacacaaaatcttcacgtccataaaactgaccgccccaaaaagcataagccgaattgacaagggcctcaaaaccggcctgttctttgtacacattatccggggtacttccggcaggattgtattcctccaaatcacatgattgcatgcccaacaacagggcggcacatgctgcaaatagatatttcttattgtatttcatgatagttatttcttttttatctgttagaaatcaagattcaaaccaaatataaactgacgctgcaacggagctttagccgatcctccgcgttctgcatcgtaatcctgaatcaaatgattcttggcaaaagagaagaggttattggcagtgacatatgcacgaagtttggacacacccaatttggaagtcaacgatttggggaatgtataacccagtgatacagtcttgatcttccaataagaaccgtcaatgtaattcaaagactcgtatcccagatagttatagaaattggtctgagccggacgcggaaaatcatttgacgggttttccggtgtccaatagttcaaatatgcggggaagtttccttttccctgaggatcgtaagcacctgccagttcatagtcaatcatctgtccccaacgagctataatatatacattcagatcgaaattcttataactaaagttattattgagtcctcccgtccattttggagactggctgccgagataagtcctgtcattatcatcaataataaagttgccatccaaatcctgcaattttatatcacccggcttaaaagactgtgtcttctttgcatctttaaaatatttggcagcttcctctgcttcattttcctgccatattccctgattgataaaataatgataggaacgcaaaggacggccaatcagcaaactactggtaatggatgattcggcgccaatgatatccttaccatcaatcaaatcggtaatttcctcatgattggcagcaaaggtaagggtggagttccacttaaagtttttgttatccacattgacggtatttaccgatacttcaataccacggttcatggttgcaccgatattttgatacatcttgaacggagttgcgttactaccacccatggaagtaggcaaagtacggggcaacaggatatcagtagtctttgtctggtataaatcgacaacagccgaaatacggttattgaacaaaccgatatcaaaacctagatcccaggtattggacatctcccagcctacattctcattacccacatattcattgtatatataataggtatagccattatcctggaaagcagagtttgttttcggagtcaagcccgactgagttccgtaagccatgatacccgagttacctgtcttaccccaacttaagcgcaacttcaagttgctaagggcttccacattcttcaagaatgcttcatcactaatgcgccatgcagcagctactgaagggaaacttgcccatttattgcctttagacaaacgtgagtcaccatcccaacgattggaaaccgtcaacatatagcggcctttataactatagttgaagcgcaaagcatacgagaaagtctgatgctgtatataatccgatccgattacataagagcttttatcattggctcccagattatgccataaataagaatcaaccaactggccttcaccttgtgcattcaccgatgtatatttggattgtgtccacgaagtcaatgcagtggcaccaaaagtatgatctttgacggttttgttataactgataatattatcccaattcacaaaactcttttcggaagatttgattttggacagtgacgttgaattctgtcccaaacggtcaatagaaccggccccttcaaaatcctgcttacgataaaaagcataattggttcctaaattagaacggaaagtcaatccttcaataggggtaaaatccagatacccattggctatcaaattggttttcagcacatgatgtcttgcagccacttcagatgcctcatccaccaacggactcacctgtccattctttcctaatggatattccaccactttaccgtcttcatcgtatgctttaccaagaggtgcattagtagcagcacgccataacacattctcggcacgctcatcctgtgcataatgagtgatctgtgtggtcgctcctactttcacggtcttgcccaacttgtgctcaatgttcatacgcaagttgtacttatccattttatcatttttgaaagaacccttttcctgataatatccggcagacaacatcgcggttgtcttttccgtaccgcccgaagctgtaacctgatggctttgaacaagccctgtatgaagcacctcatctatccagtcagtccactcaccgttctgaatggcctgccattcctccacagtgaaaagtttctggtcatcggcggtagaattccactgaccaccggtacgagctgcttcacgacgcacctgcatatagtcttcaccactcagcatatcaggatattgcgcccaaccgttgacaccaaaataaccgttgtaagagaatttggtcttaccttgcgcacctttcttggtggtgataatgattaccccattagcaccttgcgaaccataaattgccgtagaagaagcatctttcagcacttcgatagattcaatatcagccggagcaatatccgagaaatcacctccctgcataccatcaatgataaacagcggagcattggcaacattgttaccaaactcatctttcacatcggacagtgaacgctgtccacggatattaatggttacacccgaagtagccttacctgaattacgtacaatatccaaacccggaacctgcccctgcaatgcttccatggcattagatgccggtgattttacaatatcagccgccttcactgaagcaatagaacctgtaaggtcacgtttcttcatcacgccataacccacaacgaccacttcatccaaagcctgcgtatcggcctccattttaatgttcagctgattgctttttcctaccgttatatcctgcgttttatatcctatataagatatgacgagaatatgcttacctgaaggaacttccaaagaataattaccgtcaaagtcggtaatcgtacccaccgttgtacctttcaccagtacggatacaccaattaacggctcccctgtgtcatctatgattttacctgtaacagtacgtccttgctggacagactgaaccaattcaccggcaacagggtcacttgcatttgcataagaaaatgcagacggcatacataatgctgccgataaccctaaaataatgggagtacgtctgatattactttcccaattttgtttcggactttttttcatgctttttatttctattataatagtcaacaaaaatttattttattatatctatttaaatgacgcatgtaaaaagcccctgtacccaaactcaatcataaaaatacgttaaaacaaaagtataatttctttcatttagtatttatttttaactgaatcgcaaacttaaatttataaatacctgattttagccgataagattctaatacaggtagccccacgaattatctccctccaactcccattcgtgcacaatttatatctaccgtagtgttactgtgaggcttcaattcaaagccatgctccgattatttataagaacataaaaggattacatagaaaccacctccaatctttatatacgaaaagacagaacatcccgataatcaaaagaccaaagacctcatcatattaacaaataaaaaaggaggattttccgaaatggaaatatcccccttttatgtcactatcaaaaaattatattaataaccattagtaccgtattcagcagagttctctatctgatttaagaatgtatatgagataggacgtaaataattcttttggctaaaatttacggcagcacgaggattatatttaggcaatcgagtttcaaaagctttatgtcgtttcagtaaagcccaacgggtaaactcaccacacaattcacgagcatattcatccaacacatcatcctctgtagcagtagtcaatttcatattagcttcgaaatcagcttcattacgacaagcacgcttacgaagaacattcaaatactcagctgcttttgcaccatttcccaaacgttcttccgcttcagccgcaatcagatacacttcagccatacgcataataaacatgtcaccagttttgcattgcaaattacttccataaaaacctccctcgaaattaaaattaaacttattcaatgaaggaaataaagtataggtatttgtctgctgggcatcaataaatgtttccttgtatttaccatctgctgcaaacaaatcatcaatgttcacacaaatatatcctcgctttgctttttcagcatcactcaaatactcttttgataaataaacgataaaacgatcttcatcctctgctaatggataaggattcacataaggattcttcactttaaccaatttattgacatcaccagaatattctcctttaggccatacactggcaacatattgattaccaccattagaacctagattaatagcattaacatcaacatatggatatatcttctttcctacaaatttagaatcaataccatacttagtgcacaaatcttcagttaatgtaattgttgcattcttatcatcgtatgtgcgccatccagcctgtaccatggagaacagagaaaaagctgttgtaaatgagttttcccaacgtttatcataacgtgcatcaaaacagtccactaaatatttagaaggcgcataataattattattcacacgaccatagaagtaattttgcttactgcccacaggataaatatcactcaatttattaggatcacagaatgtgaaagtaaataatttattcgctccatacgaaccatatgtaaaagcatcagttcctgcctggggtcccgaagctataaacaaagcttctttattgttacgattattactttgtgcccatacatcttcaacatcatcatacaaatatgcattataagaagccatattggcaatcaagtcttctgcaacttctttcgcacgctgccaataagaaacaccattttcgcttaaaccttcacctgctccctgcgcataagctctagccaacaaacctaaagcagctttctttgttacccgggcataattaccatccataggagttgtattcaagtcagcagcagcttcttgcaaatcagttataataagattgtaaatttcctcctgtgacgagcgagtgggattcattattttggtatctgttgactctgtagttactaacgtcacattgccataattggtcacaagtaccaaataataataagcacgcaaacactttgcttcagctactacaactttcagtacattcttatctccctcagttacatctgctgcacgatttatcactgcattacaagtattaatacaagcataagcttgagaaaacagtttgtctgtagcattagtactagtagtcaacccttcataatagaacaattgctgcaatgttgttttattattttgggtaagccataaatctgtaccggtttccgctacagccaaataatcggaagcagaaaacatttggtcataaagtggagaatagcaataagtacccaaatttttcaagccttctacagttttcaactctccttctccagatgtatcgctaggattatattcatccaaagaacatgagtacatagctgctgctgtgcaaatggctaaagccatgttatataatgatcttttcattgtcttttgtctttaatgtttttgttagaatgaaacattcacaccaaataccagttgcttggataatggatacttcaaagcaccattcatttcaggatcataatctttcaacaaatgacttttagcaacggtcaatgggttagtaatagtagcatataaacggcatttgctgatgccggcatttttcaacaaacgttccgggaaggtatatcctaaagtaatattctttattttaaagaatgaaccatctacataattcaaactaccatatcctatataacttttcgtttcacgattagcatttaatgccgggaaatcatttgaaggattagattccgtccaatagttaaaataagtagggaaattacccttacctgttgaatcataccaacctaacatttcataattaatcatctgtccccaacggaaataggcataaatagtcaaatcaaaattcttgtatgtgaatgaattttggaaacccatcgtccatttgggagcattgtgacctaatacttgcgaatcagcgtcactataagtatatttattatctttagtataatagataatatctccattcttgtcagtcaaaggctgaccatcatcccctactttatagaacttaccatcggcttccttaatcattcctggcacattgattttaatatcaccaggagcacagccaaatgctgctgcatctgtttcttcacccaactgccacataccatcaatttttggagcatagaatgaatttacaggataacctatagacaagtaatagtcttcattcttaacatggtctgccgtaccgcctatcaatgattttactttttcattattcaaagtgaaagtcaaagcagaagtccatgtaaattctttattaacaatattacgtgtattcaatgttaattccaaaccatgattctgtgtctttgcaatgttcttgctcatataatataacttagaagcattgtacgcaccattgacaaccggcaaattctgcttccaaattacaccatccgtatttgttatataataatcggcacttaaatcaatacggttattgaagaaagatgcatccaaaccaatattccagttatgagatctttcccaagtcaaatcagcattcgctacattctctgaaaatttatagctgtttgttttttgaccgcccaaactataatatccatccaattctacagtcgcaacagaagaatagggatcaatagatgctgcaccagtcacaccataacccaaacgcagtttcaaattattcatccagttactggtcccttgcataaatttctcgtccgatattctccatcctaaagacacggctgggaaagtactccatttattaccttttgccagtcttgaagatccatcttgacgaaccgatgcagagaataaatacttacctaaatacgaataattgatacgtcctaccaaacctagccctttagacatagtataattggaataaacaattcccgtaccatccatgttatgccataagtacgaattattctttatattatcctgcttttgccaagacttatccgtttgattatgattccatgaggtaactgctgttacagtaaattcatggtctttcttgatattaaaattataagtgaaaatgttttcccatttataattatagcttctgttctgatcaatctgggcataaacactagcagaagtaccagaagcattaggaccatctgatgcataatattgataggaaccgataccttggaaataattctttttatcgtaccctaaactagcgttcaaccgtgactggatagtcattcctttaaagggacgaatctcaatataaggatttaaaaacagcttgaaattttgattgttatcacggtatacacttttatcttgattcaataataaattaatagtatttccatcacccggaaccggagttacattgatacttccatcttcattgtaaacggttcccaaaggaacagacactaatgaattaataaatctggaatatgctttatttctatagacataagatccttgcatattcacaccaacacttaaccatttttttatttcatggtcaatacgcatattggtagaatatactttataatcatcacctgtaaattgtccctgctcatctgagaagtttaaagagaaatatgcttttgttttttccgtacctcctgaaaccgacaagctataattttgtgtaacgccagtctgcaacagttcatcagcccagtctatatattgtccgttcaaatgtgccttataagcttcgggggaagaaaataatgcctcatccgtagaatatgttccggcaatttggtttgcttcacgaagtacattgatataactgtcaccactacgcatctcaggaaccgtggcccatccgttgaaaccgacataggcattcaaattgatattaatttttcctgctttaccacttttagtagtaattataataacaccattggcacctgccgcaccataaacagctgtcgaagaagcatctttcaaaacttcaatagactcaatatcattaggattcaatgtagaataatcacccggcataccatcaataataaacataggatcaccgctagctgtaaatgaacgagttccacgcaattgcaatttaggcccttcacccggttgccctgaggcctgagttatatccaaccctgcaacacgtccttgaagtgcttgcataggattagtagcaggtgtcaaagttatatcctcatttttaacggaagaaacagcgccagtcaaatcccgtttcttaacagcaccataaccaataactaccacttcttccaaagcctgagtatccggttccatcttaatagtgatctgggtgttcttacctatggtcacagtctgagttttataaccgatatacgatacctcaagcatccccttacctgtaggaatatctaaaacgaaatttccatcgaaatcagtaatcgttccaacagtagcttgtcctttcactatcacggacacaccaatcaacggttctcctgtttcatccactattgtacctttaactgtatgcgtttgcaaaacagactgcaccgactcactatccattctaccacccacatttgcatacgaaaaagcagccggcatacataatgcagctgataatcctaacacaacaggtgttcgtctgattccgtaacccaacggcttaggacatttcttcatgtcttttctcatttttctatggttaacaaattaattaataatccatattatttatctctaatgtagtaaaaatacgatgttttagttttctttcttcagataaagtcattacttccattgcttcatcagaaaccaataatacattcttggcctcttcaaatactttcagcagttctgcgtgctcctttaaaagcttatcccaatgaaaagctgattcaggagcatcatccagaacatacttgataaagtcgtcatccttcaaaaagtcttctaccttgctatacatcttttttgtatccacgttacaatcatttttcattatgacggatagtggttcaaagttgtactcacctgaaaacttaaaatattatcctaccaattcccttaatcttgtaatacctctatgcatcaaatttcgtaccgactggtaattcatatccataatggtacaaatatcttcatatttcttctcttctatataatataaggtaagtgcctcacgttggcgcggagataattgagccaacaaatgttttacttttatattttcaaaacaacttttttccttttccaaatattgatgttctacatcatcacctgctgcaacgggattcagttcctcaacagccgtttccgacatgaacatccgtctgcgaagttcatcacataacttgtttttcaaggaaatgaggaggtatgatttgaagttgtcaatgatacccaattcagccttctttgtatacaattttacaaagacatcatgaatgcagtccttcaacaattctttgtcagtagttaacttacatccataattaaatagaagattaatatgcatatcatataatgtagagaatgcacttacatctcccgattggaaagcggttaccaagcaagctgtcttatcatttaagttttgttccatcacagtatactaattataggttgttttgatgatgatgcaaaactagggaggatacgctacttttttaggtaatatttgattattggaccgaaaaaacagataacctgctgaaaaacatatatgctaaataatacagattttcattaaaaaggagaaccaaaataagtccggttctccttccatgtactaaattctatgaaaccaataaatacaatctttgttttcctctgctttaagcatatatatatctttaatattcaatcgtttagcaatcaccgttattgctccggtcttcggatcaacagacttcaatatgtatttcccaggtgataaatgaacaggaatatctgttgcagaatgggaataaatgatacttccaataccagattttaccagtttctgatacttatttgtaccagtatcctccatatccatagcagccgcatcagttaaaaagctttcatcggcaaccggaacaaccgagcaagagccacttgccatgaagacagcccaagccatatccggataattctgcgcatagtaagtaaccgctttttccgggaacttcttacgatattcactcaccgcccgataagcttcatcaaaagtaaccttacctactttcattttacgggcatgctgacggggagccaggttctttccaccttcgggagcataaagaccatccactttatagtgccagtaacgaatatcaataatgtcaactaatttcgcacgctgcgtatcattcagaatggcatcttgaacatcctttgtcgcacttaacgccacggtcgctttcttaccggtttctttctcccactctcctatcacatccagccagaattgtacaaaatgcaacggaccggtaaactccgcactgatcagttgtaccacatttgcatcatcggcaaaattatccaagcattggcgaatatactttctatgaaactcacgacgtaccggatgactgatatcataaaacatatccgctacaaagatacgtttgtcaccggcaaaaggaacaggttcaggcatatcggtctgattgatattattggccgaccgccaaggacagtctacccaatgtgctcccgcctccaagatattatgctggaagtaattctcatggaaaagcaaaagacctttctccgcccctttttcggcaaactgcttcaaccggttccaataccatgcattgggacggttcaaatcatacttgctcaatccttcccaagcagtaccttctccactgcgggcaaacggttgttcgtagaatggcccccacacatctccatcacggcgacggacacgctcatgatcgtcacgacgacgctcataccacaaaccgtaattatgatctaaaaccaaaatctgattcttcaccatataattcaccgtagaatcaattctatccgtcagcccaagtccttcgcgtcccggcacgaaacgggtaacatgtggcttggctttagacaagaagctggtcctcagtttcccattccaccaaggaacctcctgcctgccgcctaccagtaaccggccatccacctgcatacgtccattaataatggcaaacagatgatcctctttttccttatatataggtgtcttgaacttcaaatcttctaaagatttcagttttccggaagacacactggctgtataaggtgcttcctcaatccatttttgcatagtaagacggggagtataagcttcctttgccatctccattgccgcttctacggtaggactgctggttgcgttggtagccctgggaagaatacgtgcctggtcagaacaatctttattcaaacgtgccgccaactgtgcataaaacaagctgcggggatgtacgtgattatttgattccgcccattggccgtcacccgagaattgcgcccaacaaccgtatgcacggtttaccgcatctcttgccggtgaataacactctatcccggcagctgtacattgccagaaaagactgttgcctgtattccaaccggcaccatttttatcctgtcccaaattcttaaacaccaaatcatggccatcaatgtttaccacatcaaataataacccgcaagcccaggaatcaatagaaccgctgaatcctaacgactcttccgaatcacactgtacaaaagcattcggacctgccgcacaaaatccggctgagaaatcatgaataccctgtttagaataacaacgctgaaaaagtgtctgctgccccatagtataaaatgtactgcgacgcattccacctatctctgaaacaggttctgtggatacacaatcttctacagttgttttagagccggtacgctgtacaatcacagcacttcctgcaaagtgcttaaaatttaccctgcgcacccaacagttttcggcattttctatagatacccccgtccagcaatgatcctcatctttaggatacttcttatcatagtcagaagccaatgtcagattctccaaacctgcttctgcgattctgcccggccaactataacgtaacactttgacagttccccatttattatccaaagccattgtcaaaggagcatccaaagtcaattggtttccatccgccttacttaccgacctatcccaaaccaaatccatctctccttctttccagcccaaagcggaaatacctccgccaaaaatatcacaaccgacagaagcaatccattctttcgtagaggggcggacaatccggacccgctctccggaaaccagctgtacattattggttacctgaaaagtacaagtatttacaggaacgtatgatgtcaacacatccaaggtatccgtaacagccaaatcattccgcccttcaatataaagcaaagctcctctgtccactccctttttcaacaatacggtctgttccctgtcactgccgcgcagcacgactcccgacacagaaatacgcaagctctcattcaattcaaaagttcctttatccagcaaaacagccccacgaaaaccatttttatccaaagccaatgaagatacatagtcaatggcgcgctgaatacgagaggaattatccccaggcttccatgaaacaaaaacggcattcgccacatcaggtatagggtattccgagttacggtaaccgcaagaagaataatctagaatacggtttccgcgttcatcagtcacataagtcagtttttcttccttcacctgtaaaggaaaggtttgcgcagaaatccgcgcaaaccccaaacttaaaaatccaaataataataacttataattcattttacatcaaacttttacgttttgccaaagtatcatgattgttctttatatccgtccaatccactttctttgcaggatctatgccattaatgtatttttcaatattggtatacccgtcgccattacaatctttcaccgcatcacccggatcattaggattgagtccgtatctcacctcccagacatccggcataccatcaccatccgtatcaaccacaggcgtacctttatattcgggcaagccacctacctgacggggatctgtaatgataccttgtttataagagtcaacaggaagacgtctttttacataagtactaacgaattcaggagcgtctttcacgtaaatagctttccctgtcttcaccgtcttcatcacacgggcatccaccgcatcccttttagggaaagtagccccggcattttccaatacataattataggcagttttggcatccataatagtcacatggggcattgagaaaggctcgtttacacgaatttgatctgtaaacttccctgcgtccggcatatcgtacacctgcacgccgccatcccaattattctttgtcacacgcgcattaccttccactacatttccggctacatacgctttaccaaatgtatccggtttcttcttgtcacgacttgattcgggtttcacaatccggtgggcaatcggcttatctttcggagtgataggccccggtttaaaataattattaataatattcaaacggctggtttcatctcccccgtcaacagaacggttccaccaattaaaagtcacattgtttaccagattaaaatcctcattcatgccaatggaacagttacggctgatattggatgcgaacaagttacggcaaaacatactgttatgcccacctatagtcgccccgaaagcatgattgtaacaatccaaagcttccgaaaaaatagagttctgaatagttatgttgacagtaggaagcttcagaccatgccctgtggaatcgcgattgtatacatggcggtaaacagacatgttttcatccagtccccaactggcagagcagtgatcgataataacattacccacacagttacctcccaaagcatcatcccggaagaacacatcctgcgccccccgacggaaacgcatatggcggataataatatcatgcgtatcaagcaggaaagaggctcctgttacacaaaccccatcccccggagctgtctgacctgcaatagtgatatacggagcacggacgtttataggagttttcagccggataacgcccgaaacattgaacacaacaatacgcgcgccaccggtctcacatgcctcacgcaatgttccgggcccactgtcggccagcgaattgaccacaattacttttcctccacgtccaccgggagtataggcccctcccccttctgccccgggaaaggcaggtatgttgctctttattaaatcctccggtttggatgcccatggtttataaggacgtccttgagcagcctcggacattactacaggtaatgctttcgcccatgcctcatccgatttccggtctatttccttttgttgttcttctcctctgatttttaccgaatcaggaattacaggatactgtgccgccacaggcaacacacatgcagtcaatgctgccactgcaaatagtttctttagttgattcatttggtcgctaaattattattttttctataacttcgtaacataacaccctgcttttaacatgattcaaacacacattgcgagtatttctatatcaaagacggaacagaaagcctgttgtactctctatccgcacataaaaaaagagcttgacaccgtttcaccgggcaagctccttttccgcttttcaataaacattaatttatatctttcctccacgtgccttgatacgttcataccaagccttacgttctttcactaaatcatatccccgcttagagaggtaattattaatccggcctttgtatttgccgaaagcagcatgtttcttatttgaattttcagcatccatggcaaattcacgggcttcaacaagccatgccataatctgcgctttctcttcttctttcaaggtaggaatcatgtcaaccgtagctttataagttaccattaccacaccataagtcatgccatctttcactgcatctatctgcttggcatccaaatagagcgaaagatcggccgggaaagcgaaatgagtacggtaaagcgccgcatccttttcagcttcggcagctttaacggcttcttgtttcgcatcgcccgtcagggtttcttttgccagcttcactttggcatcgcgcgtttcgtatatgtcattcagtttaaaataacggttggctatgatagttgtcacttcacgggcggcaacggtatctgtcaactccagtttatctacaatcttctgcgaacgtttcacaatagattccacgtaagccggatcgcggccttcacggtccaaatccactgctccggcggtaatgactaccgccatgagcaacagaaacattatacctgacttttgtatcatatcctgtcttctttcctccgtttattacatcaactttcctttagaagccaatgtatcataattgtttctcaaatcagaccagtcaatacaatttctagtgctgataccattaatatatttctcaatatttgtatagccgtcaccggtacagtccttattagcatccgaaggatcattaggattcaagccatttgccttttcccattcatcgggcataccgtcaccatccgtatccacatacggagtgcctttgtattccggatatccccccatctggcggatatcggtgatgataccctgtttataagaatctttcggcaagcggcgatatttaaactgtccgtcttctcccattgatttaggagccagcccggtcaaatcaccgttagcatccttggccatcttcttatcataataaggaacgcctgttctcacttcctctacaatacgttcatccacaatatcacggcaaggaatgttggcacctgcatttttcagtacaaaatcgtatgcatcatgtgcagaagtaatgcggatgtacggcatttcaaaaggacggttgctacgcatattctccgtatatccatctgtattcggctgagtttcaatctggataccacctgcccagttgtcctctgtaatggcaggatagccttccataatattaccatcagcataaacacggccatacactttatgatccaatttgcttcgtcccgcttcgggtttcaggatgcgatgccccacaggagtatctttcggagtggccggtcccggtttataatagttgtttatcatattgaacatagcggtataatcgccaccgtccgaagagcgatgtacccagttgaacaccacattgtttacaaaattgaaaacaccattccaaccgacggaaggattacgtcccgaattacttgcccacaggttacgcataaatgcacaattctcaccacctaaagtgctgccgaatgcatgattgtaagtatccagcgcttttgccgagatagtattctgtatggtaacatttacggtaggcagtttcagatcttttgattcatattgtccttcgctggggtcgtacatatggcgatagaaagaaatgttctcatccaatccccaagtacaagagcaatggtcaatcatgatatttccaatcgggttgcctccgaaagaatcgtcacgatgccatacctttgtttcgccgcggcggaaacgcatatggcgtaccactacatcatgcgtatttacccaaaaagactctccggcaatacataccccgtcacccggagctgtctgtcctgcaatagtgacatatggagcccggacgataatgggagattccaatttaataatacctgaaacattgaagacaatgatacgtgctccacctgtctcacaagcctcacggaaagaaccgggaccacggtcattcaaattagtcacggtaatcaccttaccgccacgaccgccgaaactgtacatacctcctccttcagcaccggggaaagcaggaattcgtgcctgcggcaaatcgtatggacgggaagcccacgaaatatacggacgaccttctctcgcttctttctgtacaacagacaatgcttttgcccaggcttcgtcagagcggcgacgttcttcactcatcattttctggtaggcttgcttcgcttcctcagtcaactggggatactgggccattgccactggagcaataaaagtagccatacacagtcctaaaaacatttttcttttcatactttattcttaaaaaattatatctgtgctataagtaagttggaatttatattccgttctctttttcttaacaattatctttttcaagacgcacttttcggggatatgtactcaaaaatgcttgtatctgtcataataaactagcagatataaaactatcgtattaaattatttcctagcatccaatgtgccttctgattcataataatccaaccatccttttgattgttccaaccacggattcatattcaatacattagagggcagaccggacagataatagttttcctgccatgaaattactgcttcctgaccattcacattatctaccggagtttctctatcctgtaaaacaaagtgctggctccagaactctcccaacctattcatttcggcttgtaagtctgccgcattatccacatctacaggctcaaaatcagcaatgacagaaacaagaggatctgcctttccgtcataatccttcacttgtaaatatttacccacacgggcagtaccatttaacggctcaatacccaaggtagtacaggtagtattgttatcacttgcatcatcattatacagcatccaacgccataaatcccaataacgcttaccctcataagctaattccacctgacgctcacgcagacaagccttaatagcttcattcttatcggtaatcgttcccaagccataattattggatgcaggaatacctacacgggcacgaatttcaccaattgttttcactgaattacttatatcccccgtagctgcataacattctgcaaggttcaacaacaattcagcataacgatattcgtatacatcagtgccatcccattgatatgtgtttgcactattttcagccggatcggacattttacgtactatcgccggactgctgccttcattttccgtgtaataatgcaactgagaaccatcttctttcgtttcactccaacgataattccaaactacggcatctgcatcctgatcatatccccatttcgctccggagaaagtaaacgtgtaatagaaacgcggatcacgattcttgaagaataaagaacggtcgtacccgtttatcgcctcaccgtcatcatttacagctttggaaccatccgccatcgggaaaatatccaacatacccataggaacatgataaccggaaccactgccacccattgttttcaagcggattgttttctgccatccactatgttcatcatttttagaggtagagctagccaacagtttgaccataatcacctccttacattcctgattatcaaatttgtagaacatttcattccagtctttggcggaattgccatacaaaccataaccttcgctgctcaagaaagcctgtgcttctagagtaatatccaacgcatctttccagcgtttactgcctgtattattccaatctgcattaaagatagggcttgcaaataccagcgccacgcggcttctgtatgccaatgcagcttccttggtcaaccgtccatactggtcacttccccattctttacgagtgggaagcagattcgcagcctcttttaaatcactcaagatctggttgacacatgtttccacactttcacgattataatctttagctccctcacggtcggccgccataagcactttatttaccacaggaacagctccgtatacacgtaccaaatcaaacaactgcatggcacggaagaaataagcctgtcctttcgctttttttatggcagcttccgacaagtcctgaccatatttatcaactccttccagaatttcattgcaactgcggatacggctatatggatcattctttatattcgtagccagattactgccaaaataagtttcacagtccgtagcttttttcaaacttctggaagcgtcaaatttcttctcgataccccatttctcctccgtataagttgaatagtcattccagttaccggacaagccgtatgactgtggaggggtcatacccgacttataaaaatagttataatacacattctgaatatataagtccaaattagattcgatgccgaaagtcttttccggtgaataactgtcatacggattcatatcctgcaagaactggtcactgcaactgctaaatgccaatccggctgccaataacacagtatataatatgcgctttttcatatcaatgattctttttaattttagaatgatacatttactcccaacgaccacgttctcaatgtaggatacaatgaagttgttccacaatacatattacgataatgatcgggatacgggttatagaaatcccatagattattacctgtcagacttaatttagccgactggatctttaaaggtgacaaccatgccttaggcagcgtataaccgatacttaagttacggatatagcaacggaacgtactgatagaccaaaaatcagacggtgcaattactgatcctgatattctgttgtctaaacctaaattaggatatttccccgtcgtattatttctttcatcaaacatatcttcccagaatgagtccggtgtccaaagcatatccccactggatgttgtgattttattgacgtcaatctggcgataaccaccccatgaagtggcaatcatcatattaaagctgatacctttccattccgcccccagtttggtggtaaaaccatatgtctttccactcttattcagtttggcataatcctgggtcttggcaatacgtccgtcgggccccgactgcgtaccatcctcattcaatacgccacccaaatcctgataagccaacatacccggttttaactgactggcatcttttacgcccaaatattccggagaagtgcctgcggcttctgcattggccgataaatagttccaataattctcaatatcatcactgttccgtaaaataccatctccggaacttgtacctctccatactttatacccgtatgtagggaatatagtagaagcaccctctcttacagaattttcctgtatataactcggagcagactggggccattctcttaccctgttgccattaaatccaaaattcactccgatattatatttcacctgatctattttatcgcgccaattcaaagagaattcactaccaaaagcatcaatacgcccaaagttcacttctgtcaaagcacctcctgcaaaaataggagtacctatgataccaccgatattctgattcaagatgtcagagtttatatcatagtacacatccacagtcgcacttaaacggttattgaggaaacgcaaatcaaaaccaagattaaatttatcggtattatcccaatgcgcatcaggattaggagtcgctcccggcttgatacccgtttgcaggataccaccgttagaaccgaatccatatcctctactaggatccaatgaatagagttgcttccatccccatgctttgatattatctttaccggtacgtccccatgagaaacgtactttcatgtattcaaaccatgacggcagcaacttcttcataaactcttcttccgaagctacccaccccacggaaacacccgggaagaagccccaataattggccggagcaaatttagtggaagcatcgctacggaataggaattggaacaaatacttatcggcataattatagcttacacgacctaaataagacaaagatccctgtttgtatttatatgtaatagaattacctgtatccatcgctcccgcacttggcgaagtacccaaataaccatccgggtcagggttattaaacaacatccgcttggaatgcatataagcctgcattttttccactgcagccatggcggcaatgctatgcttgccaaactttccttcataattcacatagaagttcaattgctcgtttttagccatctggtctgaatataccacacgagtgcttcccgtaaattcttttaattgataatcggaaacagacggatgatcgctataaaaacgatttccgggtgtcaatgcatcgcttgctttcagataagccaacgtaaatggcataaatgcctgctcactatcactggcactacgcttcaacgcatagcttcccttgaatgaaagacctttgataaacggaacggcataagtgacggagaagttggcatcataactgaaattatcattcgtggaataagaaccgtcattattctccatagcaaaataattccatgtactcattttattgcccgatgttgcattacccgcactcgagtaactattcaacaaaggagatgtataataggtattaccatcatccaatgttatctcccatggcaaataattcggcatatgagcaagaaccaaataatcaccggattcaccgggcttagttcccccataaccgttcaaattgcttaaacctttggtaaaactcgatgtggtttcctgctggttacccgctatggttgcagaaaatttcaaatcggaagtcaatttgatatccacacctgcacggaagttccatctattataatcctgttttccaagattcgccccctgagtatagtaagaagcacccgcaaaataagtagctttctcgctaccgccacttacattgaccgaatggttcattgtaaaagcgccggaccaggcttcatccagccaattgtaattcaagccatccatctcggccagttccgcttcattataaattttattcatccagtttccatccggatccatacttatcttattattggccaaattaaaggaattggcaaaacgtccataagctgctccttttaaggttttaggatgtcccactgcatcattaaatccgaatttacctgaataattgattttgggagctcctgatttacctcgtttggtctttacaataatagcaccttgcgaagcacgggaaccgtaaatggcagcactggcatcacgaaggactgaaatactttcaatttcagaaggatcaagggcattgaaagtttctaatgtcggaagaccgctgttggcatctatctgaatcacatcatcgattatgaccatcggattagtactaccaccatctttagaatacgagaaagattgacgaatagacatagttgccccttcacccggacggctgtcaccaccactgatactcaaaccaggtatctgtcccgctagcgcagcacccaaattcgacaccggcaaatctgaaatttccgaaggagtaataaccccgatagatcctgtcacatcttttgctttctgagtaccgtaaccgactacaaccacttcgtccagcattttggaatcttccttcagcaccactctaaagtcttttccttgtttcggagcaatcgtttgcggcacataccccacaaatgaaatgacaaccttcttgcccgaagggacttgcaaagcaaatcttccgtcaaaatcagtaatggtaccgtttgtagttccttccaccaccacactggcaccaatcaccggttcaccagtttcatcaaccacctgtccggtgacagttttagtctgttgcaccgactgggatataggaaatcctgtctcagcggatactccctgaacagaaactcctgtcagaaacagactgagacagaccacttgtgtcaagttgccaatcttgtccagcttctgaagaaatgcattttctttcttcatagaatcatttttaaaattaaaatattatcttatttttcttgttgaaatatctgtttcagataagcgacattcgtcccgaagtttttctttacattccggacttcatccttattccgtgaccgttcaatgaccagccatccgctccaccccatcttatcaagggtatgctttacggcattcatatccagacgggtattataaggaagagtaaccccgtctgtatccgtacaatgtatctgacaaatccgatcctttcccaattttttcaactctttacagaggtcgcgtccattttccaacgcattttgaaaactataataaatctttatacctttcgaattaatttctttcaacagttttatatcccctccggcgtccaaaggagtacggatacctatcactactccatctttcactgccatttctcccacttcgtgcaaacggcttaccaactcctgacgtgcatcacccgctactgtccagtcctcttttatgccgcctaatggaaggaaagctacttgggcccccatcaccttcatcgtattcaaacaatcctgcactaaagctttataattatgatgagtcaagaaagattgtccaaagaatccggacatcgccacagaagggacttcaatatgctgttcctgtgctgtttctttaaataatttacagaaatggggctggtggaacttattatcaaaagtatcccgttttcccaagcctcccatgtccatttctatgccatcacctcctagttccttcatcaattgaaaagaaccgatcttctgacgctttagcatcatccagtcacacgcagctattttatagcattgttttccctctgaattctgtgctcccaaaggcagtaacataaacaggagcatgattaaactgataatttttttcacattcatcgtaatctagttattgtttagaattaagacgaatcacaaaaaagtatgtaatcactaaatcttaataaagtccaaaaataacttagcaaacaaataagacaatcccgcaaacacgacgctcgcctacatctgtttacgggattcctgctttataaggtcaagaaatcaacctttacgccattcattcatatattccctcggagtctgatcatatttcttacgaaaacatttactgaaataaccggaatccttgaagcccacggcaaaagctatttctgaaatactcatatccgagtttttaatcaactctattgatttattcagacgaatctctttcactaaatccaccggagcaaacccggtcaggctctttaacttcttaaagaaagccgagcggctcagcccgatagtcgatgctatagtatctatattaaaatcactattatccagattctcttctataacctgatgaatcttttcaatgaactgcacatctttcttcaccaggaactgttcgtatgtatcctgttcctccttatgttcttcgggctgctgccatacacgttcacggaacaatttacgttcattcagcaactgttcgatacgtgctaccagatagtctttgctgaaaggtttgatgatataggcattcgctcccatgcttatcgctttggtcttcgcttcatcattacctttcgccgtcaggataatcaccggaatatgactgatctggaaatctttacggatgcgttgcaacatctctattccatccatattcggcatcatctggtcggtgactaccatgtcgggatgataaagatgtactttcttcagcccctccacaccatcattggccatataaatattgaatttatcttccaattgcagcttcaacatattgcataaatccttattatcttctacaatcagcacggtaggcaaagacgaatcgacaggctgttctttctcctcctcgctttccttgccggcagaggcagaaacagattcagcctcaggaacactcaccgtttccccgcccatatagaaatcgacttccgacggtttgtaatgctccttacccagttgcaattcaatggtaaagaccgctcccttcccttcaggactctctgcatagatttccccatgatgcagactgataatttccttagacaaagccaatccgatgcccgttccctgataataagcgccacgtgcattgtcagcctgcgagaaacgctcgaagatttcggaaagcttgctttggggaatccccacaccgctatcttccacccgtacataacaatgcctgtcatcatccgacactcccatcgtgacataaatatttcccccggcaggagtgaacttgaacgcattggagatgatgttgcggatcacgatagccactttctccttatccgcccataccatgatatcctcaccggccagctggaacgtgaagctgacttcattttcttcggccatcaccctgaattctttctcaaaagagtctaccatctcattcaggttgaacaacgacacatgcagacgcatcttgccgttctgtattttacggaaatccaatatctgattgaccagttgcagcatctgtttggtattcttttccatcagatccacatattgcattcctttctgagatagtttctccttttctctcagttcctgaataggcccttggatcagagtcagcggagtacgcaactcatgcgagatattggtaaagaacttgattttcaattcggacaatttttgttcgatatacacatcattcttcaccttaatcatgaaaagagataattttatagccaccagcaataaggctacggctataatcatatagataacatacgcccaccaactggcccaccaaggcggcagaatgacaacggtcaactcacggaaagactccaaaccgggatttgcctcatccagtgtctgtactctgaaaagatacttaccgggaggaacattggtataggaagctatacggttcttcccgttatagtgccattctttttcatatccttccaaaatatatttgtaagacacacggttctgattattatagttcaacgccgcaaactctaaagtaaacatggactggttatgattcaatgtaatccggtctgtataggtaatggaccggtcaataatgggatgttccgtatagctgcgtatatcccggtttgatatctgacatcctacaatgaatgtattataatcgacctttttcgtttccaatttatcgggagaaaaggtcaggataccctctttacaccccagccaaagttctccgtccagcgttttcagtgcggtgttttcttccatcacaaccggaggaaagccatcatatttgtcatagttacgcacctggcttgtcgccctgtcaaaacaagagagtcctttttccgtagcaagccaaaggaaaccgttatcatcttctataatagacatcaccacatcattattcaatccgtcttcccagccatacgatttaaatgaaagcttatgcgtttcctcatcatatcccgacaatttgctcaatcctccaccaaacacgcatacccatatctgagagaactcgtctttataaagcgcgtacacatcgctatcggcataatttacccggttggcaccacggtaggtttcaaaatcaatctgctccactgaggcaaagttgtttttaaaagacatcagcccgtccatcgtacctacccacatacgcccgtcattatcctctatcatatttctcacttccatataaaggccatacgtaggatagttcttgaatccgttatatttattcttaaaagtgacttccccattttcctcacaaagcagattcaatcctccgtccaaagtacccacccagatacgtttcttttcatcctgataagtgaaatacacatcattcccgctgattgacgacaaatcagacaaattatgcagatagcgtttaaaacggaaaccacctgccgctttctcatcaggaacagccttcaccaatccgtcgcctttggtagagaaccaaaggtttcccttgtcgtcttccatgatgtgatatacattacctatgtgctcgtcacctgtcgaaaaaacatgtttggttacaccgttccgatccatccgatacacactctgccaacgggtgcccacccagatatcgccactttttgattggaaaagggctcttacccctatcgtataattttcctgcccggctgattgcggagacaacgaaagcagattgaattgcttcttggggaaattcatgcaatacaccccttcatcggcagaggaaagccacaataccccgtcattatccaacatcagatgataaaactgctgatttgccctatcattagaaagttgtttcaacttattaatataaaccatctccgcatgttccctgtcgaacaaccaggcctctcctgccggagacaggaaaaaaagccctctttcaccggcatcttccgaatacagggtggttatcttgccgaacatggtaaacggaaaccgttttgcggtatggttcaacggatcataataaatcagcgccttctcattttcgtgaaaccatattttatcatactggtctatgaatgcatgagtaaccatagcgtcattcatttcagtatttatcttttgcaacctgcgctcggccaaatcatattcgtatgtaccttgtccggccacactgagatagacataacctgccggagtaaccagcaaattgctgatcgcaccttttatttcggaaagtacataccggtttaccaaaccggtccttacatcgatactgtaaaaaatacccgcacgatctccgacccataccttcctgccatcctcaaagaaactggtaaaactatccttgtcaccggaattaatcttactggttatgaaatcggcaggccgggatgccaattccgctcctttatgcacggcagacaccttataatcagttcctatccaactgatatattcctccgtttcgcacaggacatggtgtttcagtgtataatcatgcttgtttatctcgtcccgagagtcgaacagaatcttgatagttacctgccccttttcatctaccccggccaacaacagatttttatctttggtcagcaacaacacatccccctcggccgtattttgtaattttatcacctgaatattctccgaatagttcttcatgtcatcataaacagcatgaaaacattcggtcactttattgaagacatacaacttacggtcaatggtctttacccatatatacccgtttttatcctcgactatgcgctggatcttacgtggcggcacatccgaatcgtgctcctgtttattgaatgttttaaacttcactccatcgaaacaacataagccataccaggttccgaaccagataaagccatctctgtctttcaaggtacagtttaccgtattattaggaagcccttgatctacagaataatgttccacaatcatattcacattatatgaccacagaggaaagcttgtcaggcaacaaagtataataagtatatatttcttcataagtatttagttttcttcaaaccgagatcaaagataagaaaaaatccgttggtacttaaattgaaattagttaaataccaattattggttagattggaacgagataagtccgcgttctatctatattacttctccgtaccgaattcagtttgctgtctctccacctccatcaatactttttgcctttcctcttctgtcagcacaactttccccgccattctttctgttctaacagggcttccggccagtcctgctccggctgattgggcatccgtctcctcctccgtataacagaaaggcagttctgacggaatactttctaattctatttccgtagcaaccggtgcattcgttccttcaaactgcacatgggccttcacctttattttgccgggcttgcgggtagaacggatcaatacgggagcagagccaaactccaccgtgcgcggattggcattgatagaggcatcccctataactcgtccttcaccttctacagtaaatacgatattttcttttgccagacggcgcacattaccgctatcatccgtcacttcggccactactacgataaaatccgaaccgtctgccaccaattgctttccttccgtatccacatacatacgcaacttcgtgctgcggcgtgacggcatccgcttataggtgcaaaccactttaccgtctataattccttctgccaccatatttactttctgccagtttttttgcttataactatactcgcgtgcttcccagaaatcccatacatccttgaatatcaccggggcattaggcatgtgtccctgcgcatgaacaaccggaagcgtccggctctcagtaccgtcatagacagagagacgaaccgagtcacaattactgaacaccaccacatcggcatccgagaaaggagacatctcatgggcgataaacaccatagggccacattccgccacaggatgcttcaatgtcgcggcagactggctgcgaaaagcataataagcgtatttaggctgacggaacgcatcataaatgcccccgaaatacggatcgggatgatacccccgctgatggtcaaaaggatgccattgcgccccaccgacaaactgccctgtagtgcggtacatttcatcataactctttgataatgacagtgcctgcaccagcaacgggcgttccccccagctacggctggcacggttattattattatgtgcataccagtcatccacattctcgccaaactcacgagtaaaaatacattgttccggacggtctgccttctcatcatctcccggccatccgtacaccacatcatagttttccgccactcctttcgaatgaacatcggctgccgctacaggacgtccgggataaggaaactcctcccgtgtaatccgtaacgcctccagtgcgaaatcgcgcggataaggcgtttcattcaaaataggctcccacatcagcacactgggatgattgcggtcccggcgtatcatctcacgggtattccgatgtaccaactttgcgaactccggatttttattccaatattgccatcccggagtagccacaataacaaacagccccatttcgtcgcaagcatccatgaatgccggatcttgcggataatgagctacacggataatggtacatcctgcatcacgcaagcgtttggcatccctccattgctggctgttgggcagcgcattacccacgtatgcaaaatcctgatgacggttcgcgccgaccaattgaccaaaaggcttgccattcaaccaaaagccatccttacctttaaattccgctttgcggatccccacacgtgtcactcccccatccaacacttcatgtccggctttgacacgagattgtatcctatacaaataaggcgagtcaggagaccataacttaggattgcgaactgcaaaccgttgccgcaccgtcttcgattcccctgcttgcagcttcacctgttgcgaaacccgttttacgggaacatcgccggcatccaccaaaaccgtctccacggctacggtacgcgtccgctttccactgttatgcacttccgtatccacatacacttccgcttttttcccgcttatattgtcaaaatgcacaaaaactccgcctccggccaccttatcggcctccaaggcatctgtaatagctacacttgattttcctatcatccacacatcccggtaaattcctccatgataagcgaaatccaaggtatattgacgttttcccggaggaaaattcttatcatcactattatccgtcatcactgccagcaagcaactgtctccgggctgtaccccctgttccgtcagttgcacagtgaaaggaaggtatcctcccaagtgctcttgcaccctcttgccatttaaataaatcacctgttttcccatagctccctcaaaatgaagcgacacctcttttcctttcatatcttgaggaatcacaaaatgtttccggtaccatgccacaccctgatagttacggcaaccgcttgcctcggcaggcatcagttccacagtatgcggaacagacactacctgccaggatgtatcatcaaaacgtacggcttccgcgccttttatgtctccacgatgaaagcgccatccgggattgaaattatatactattcttccgctaccggataaagggatgaatccggctacagaggtttccatttgagcttgtgccaacacaggcaacaggcacacaagtaaaataaacagtttcttcataattattacactatctgggaaaagagacggaccggccgtccgtttgtacccgttccttttgaaaaaaggtcttgttgtttttgaaaaagatccagacatttaaaaaaaaggtcctgatgtttggcgtcaaagacaaggttcttttaaaaaaacgtcaaggtctttttatacaaagaacaggtcttttgaaaggaattacaaggtcttttcaccaagctttccaaggctcagggctcaaaggctcacttaggcggtatttaagcccaaaacaagcttcaagaaacctaataacgcactgatttttaattaattacaataaaaagaaggggacaagactatattctaaaaaataaaatgaataatataatgagccccagacatacacgaacgcatccgacatttaccggaaagaaaaatgtataaataaaagaaacttctattgacatcatcacttggtcattccgggcatcgtgaaaaatccgaatgtgcccatatccattgatccggccattatgaataaaacccggcaaaaaacaagcctggtcaaagcaaacacaaattctataaaacgacagacaaagtcaagacaatcctgaactttccaaagaccaaagaataatattcaacccgcacgttttgtcccaccaaacagactgtaaagcaaatacttacacatctaccaaggttaaaataccgcataagtgagccttgagccttgtgagccctggaaacgcatcggaacgactctttttctttgcagaaagacacccgatttatttattccaaattttaatcccatttatgtactgtgagtcaacaccagaataggatactaaatgttcttttgaggccgatccatatctagacacaacttcgttagctgccccggattgagctgctagatctattgacttttttctttttgtcgtaacactttctcctaaaaaagaagtgtgacactgccaataaccacattttaaagtgcaggtcctgagaaaacctaaatcaacagatatggtaaagcagcccacgctataacgtgggaactaccatgcctattcttgttgattttgtgtttagtttctcaagcttcgcacttacaagagtagcataacgcttctttattttcaaatgcatggaaatggttacccaaatccgagtacagaattacggaaaaacatttgaaaaagaagcggtaagataaaaatatctgtttgatatttgctctattgtttggtaggttagaaataattaattacctttgcaccaacaaatcccgctcgcttcccgtaagattagcgtacccagcgggacatttttatttatgggagtcaggtatacaaatcgagccataaccacggaacaacaaattgatattctcaaagaaagaggtttgcttattgatgatgttgagcgagctgttaaagcccttgacatcataagctattttcgtcttgctggttattggcgacattttgaagctgaccacactacgcatcaatttagagaaggttgtcgttttgcagatattatcgacctgtattcctttgataagcaacttagggctttgctctttactgccattcaaacgattgaagttgctgttcgcacaaaaataatcaagcactttgctcttgaatttggagcattttggtttatggacgaaaactttgccaccaatgaggctcgttttgctaccaatttagctgttatccgtaaagaggtggaacgctcacacgatgattttattactgagcatttccgcaaatacaacgaaccagagctgcctcctgtatggaaaacattggaggctatctcaatgggaacactctctaagctctattccaatttttcaaatgccacggcaaaacatgctgtcgcaagagagttcggtttgaatcatcacaaatttttgagaagctggttagagtgtcttgcggtgcttcgtaattgttgtgctcatcattcacgactgtccaaccatgtctttccagtaaaaacaaagatgccagaacgtatgccaaatacatggattgctgatttctcattccgagaacaaactctttatccacaattatgctgtgttgtgtattggctcaactccattgttcttgaaaatacattcattaccgatttcaagcaactcttgataagccatccatcagtgaaaactcgcttgttgggcttccctcgtaattgggaacaagagcctttgtggaggtaataatatctacaataaaattatttccaaaaaacaataagtaacaaacaatatcggataaaatattgtacctttgtattggcttagacattgagcccaaatagaagtgaaatatcggaaacgaattgcaccgaaaaaaaagaataaatcgctcgtattgacaccgtagatgagttaataataactaaaagggttaaatatccaccacttagaatatacccttaaaggctacgaccatatttccggcttaccaccagtaaactattgattaactctatcaccaaatagcggtgtaggaaggtattgtacatcaatatgtcaattatagtaatcatctcctgacacctcaatatggtattgtcgtcccatgaaagcaaaacctgcgcccatttccacaaggaatttctctacatgtttcaccaaaccgatttctacatcacgctcattgtattggtcggtaaaggtcagcatatcgaatatatacgggtctttgagcattgatttcacatcgtttacttcgggaacaggcagggtttcagtgaaattgtttgccaacgcaccatgcttgccatagtcatcaagtttgatagcttcttgcagatagcgtgtattccaatgcgatgtaatactttgcaccatataccaataccgtgcgcgaatatccttgacttgttgtaagagtatcaggttatgcgtccagcctagatgtttgataggaaaggaaaaattatattcgcctaattgcgcaatcattgattgcgcaattgaagaatcagcacctttcaccatcgtaagttcttgattgtattcgttgaagaactgtatcatacactgcatgttgcgcacagaaaaaccctttatttcggaataatcgttcttcaagtccacggacaagcgttgcaaggttttcttgccccaaccatctgcatcttgactttgccgcaacatacctccaatatcccaatacattcggagcatttcttcgttggcggcataaatcgctcgttgttgggcaaccaatacccgctgcttgattttacgaagcagtgccgcataaccattgaaattatctgccaagttatcaattgcttgtttatctgtatttttagtcataatcttctttgacatttccacaaagttacgctttttattcgattgtacatcaaattcttacaatattattagttatacccattatggactattttctcattgagaaacctcttttctgctgttggtcataatgttatcttacaaccggtcttttcttttagcatttctataaattcgaccaagttattttcttttcccatgataagttgtcatccaataaacacaatgtttccatgacttcctagttcgatgcagtcatttcaaaatcaagagaataccgagcgaacggataagatacactgttttcaacctcaaattatacggaaaaacccataccttttttatacctttgcccccaaaagaaaacaacagacatggaactattcaataaaatgattgccgcagccctgaaggtttccgtacatcaagtagacaatacattatctctactggacgggggagctaccatccctttcataagccgataccggaaagaggcaaccggaggactggacgaagtacaaataggcgaaattaaagacagaaatgacaagttgtgtgaactggccaagcgaaaagaaactattctttctaccatagaagaacagggcaaactgacagaagaattgcgcaaacgcattgaacagagttgggatgccaccgaagtggaagacatatatctgccctataagccgaaacgtaaaacccgcgccgaagcggcacggcaaaaaggactggaaccgcttgccaccttactgttattgcaacgcgaaaaccatctggacagccgtctccccgcttttgtgaaaggagatgtgaaagacgaagaggatgcgctgaaaggcgcgcgcgacatcatagccgaacaagtgagcgaagacgagcgcgcccgcaaccaactgcgcaaccaattttcccgacaagctgtcatcacctccaaagtggtgaaaggcaaagaggaagaagccgccaaataccgcgattatttcgatttcagcgaacctttgaaacgctgttcctcccaccgtctgctggctatccgccggggagagtcggaaggcctgttgaaagtaagtataagtcctgatgacgaagagtgcgccggacggctggaacaaatgtatgtccgtggcaacaatgaatgcagccgccaggtaggcgaggcagtgcgtgatgcgtacaagcggcttctgaagccttccatcgaaaccgaattttcagccttgagcaaggagaaagccgacgaggaggcaatccgcgtcttcgccggaaacctgagacagcttctgctggctcctcctttgggacagaaacgggtcatgggagttgatcccggctaccgtaccggatgtaaaatagtctgtctggacgcccaaggctctttgctgcacaatgaaaccatttatccgcatccgcctaagaatgaatactcacaggcagcccgcagcatcgtgaaattggtagaacaatatcagatagaggcaatcgccataggcaatggcaccgccagccgtgagacagaacaattcatcacttcacaacgctatgaccgtgaattgcaagtatttgtagtaagcgaggacggagcatccatttactcggcctcgaaaaccgcccgagacgagttccctgaatacgacgtgaccgtgcgtggagccgtatccataggccgccggttgatggacccgctggccgaactggtgaaaatagatgccaaatctatcggagtgggacaataccagcatgatgtggaccagactttattgaagaagtcattggaccagacagtggaaagttgtgtgaacctggtaggtgtgaacctcaataccgccagccgccatctgctgacttatatatcgggactaggtcctgccttggctcaaaacattgtggattaccgcaccgagaacgggcctttcagttcacgcaaggaattattgaaagtaccccggatgggagcgaaagcgtttgagcaatgcgcagggttcctgcgtatcccacaagcgaagaatccgctggacaactcggccgtgcatcccgaaagctatcccatagtggagcagatagccaaagacctgaactgcaccgtagacgaactgataaaaagcaaagaactgcgcagccggattgatatcaagaagtatgtcaccccgacagtggggcttcccaccttgacagacatcatgcaggaattggacaagccgggacgcgacccacggcaacaaatccaagtttttgaatttgacaagaatgtaaagaccatagaggatttgactgaaggaatggaactgcccggcattgtgaacaatattaccaacttcggttgctttgtagatataggaatcaaagagaagggtctggtgcacgtatcacaactggccgacaaatttgtgagcgaccccaccaccgtagtcagcatccatcagcatgtacgggtgaaagtgatgagcatagacctagagcgcaagcgcatccagctcactatgaaaggattgaatcaataattgcaacaaggtaaaaaagaatatggaagaagatatagaaacctgcggctggttcgttttttataaggatcagctgctgatagagaaaaagaacggaatgtacaccatacctttcggaacagagcctcccatgcctgttccggtgggaagcactatccacaccatcggagagatagagggacgcactgccaagactttctccgtacatgccccggtgcccggcagcgaaaatgaccgccacctgatgatggatctccggagttcatacgacgtattgccttgggaagagtacaatgtgggtggaaaagccttccagatactgaattgggacaagaacagccgctattgccccatgtgcggcgtacctaccgtacagatttctcctattgctaaaaaatgcccccaatgtcgtcaggaaatttatccgcgcatctctcctgccatcattgtattgatacgccgggaagacagcatactgctggtccacgcccgcaacttccggggaaccttcaacggtttggtagccggttttcttgaaccgggcgaaactttggaggaatgtgtgcaccgcgaggtactggaagaaacaggactccatatcaaaaacctgaaatatttcggcagccagccgtggccttatcccagcggaatcatgataggcttcaccgccgattatgaaagcggaaacatcaaactacaacaagaagaactgaatgccggcgctttctataccaaagacaacttgccggagatacccaaaaagctgagcctggcaagaaaactgattgatgcgtggctggaggaaaaggatcatttatagaacgagatgagtcatgttccatccataaatacctatttatcgcttgcagaacttaaaaatgtactatctttgcaatatggaatggttaaatagcttattttttgaacacacgcctttacaggcggttgtaatcctctcgattatcattgccgtggggctcggtttaggtaaaatccacctgtttggcatttcattgggagttaccttcgtcttttttgccggtattctggccggacacctgggattctcaatcgacccgaatatgctgaattacgccgagagtttcggtcttgtgctttttgtatacgaactgggcttgcaggtaggtcccggctttttcagttcattccgtaaaggcggcgtacagctcaatatgctgggcataggcgttattctggcaggtacggtcatgacggtgcttttcagcaaactgggaggcataccgatgagcgatatggtaggcatcctttgtggagccaccaccaatactcccgctttgggggccgcccaacagacattgaaacaaatgggggaacccgccagtggcgctgcgttaagttgcgccgtaacctatccgctgggagtggtaggtgttattctggccatgctgctggtacgcaaattatttgtccgtccctcagatatcgacattcacgagcacgaggacaccaatcaaacgttcattgccaccttcaaagtgcacaatcccgccattttcaataaaagcataaaagaagtagctttattaagctatcctaaatttgttatctcccgtttatggcgggaaggtacggtaagcatccccacttccgaaaaaatactgaaagagaatgatcgcctgctggttatcaccaccgaaaaggacgctccctcgctcacgattcttttcggcgaacaggaaaaccaggattggaataaagaagacatcgactggaatgccatagacagccaattgatttccaaacatatcgttatcagccgccccgaaataaacgggaaaaaactaggctctttacgtctgcgcaacagctatggcatcaacatcagccgtgtgatgcgcagcggggtacaactgcttgccacaccggggctgatcctccaactgggcgaccggctgaccgtagtgggagaagccaaagccatagagaatgtggaaaaagtattgggcaatgcggttaaaacgttgaaggaccctaatcttgccgccatttttataggtattgtactgggattgatactaggctccatccctatcgccatccccggcatcagcactcccgttaaattaggcctggcaggcggacctatcgtagtaggaattcttatcggatgctttggcccccgtttccacctcatcacttataccacccggagtgccaacctgatgctgcgcggtatcgggttatccctctatctggcttgcctgggactggatgcaggcgcacatttcttcgagacagtgatgcgccccgaaggagccatctggatagctgtaggcttcgccatcacctttattccggtagtcattatggcattagtggccctccgcataagccacctcgacttcggaagcacctgtggcatgctgtgtggaagcatggcaaaccctatggcattgaactatgccaatgacacgttacccggtgataatccggcagtgagttatgccaccgtatatccgctgtccatgttcagccgggtcattatagcccaattaatacttatgttttttatataatttccagctatgaacgcttataattctatcacaccggaaaccatacaggaagatatgcgatacctgcaactgctgtcgcatagtttccccactatagccgatgccagtacggaaataatcaacctggaagctattctgaacctgcctaaaggtacagaacatttccttgccgacctgcacggagagtacgaggcattccagcatgtattgcggaatgcttccggggccatcaaaagaaaagtaaatgaaatattcggcaataccctgcgcgagaatgaaaaaaaagaactatgtacgctgatttattatccggaacaaaaactggatctggtaaaagcagtggaaacggatttggacgactggtatgtcatcacgttgaaccaactggtacgtgtatgccagaatgtatcctccaaatatacccgttccaaagtgcggaagtcgcttcccaaagaattctcgtatatcattcaggagttgttgcacgaaaactcaatggttcccaacaaacaggcgtatattaatgtcatcatcagcaccatcatttctacccgccgcgccgatgactttatcattgccctatgcaacctcatccaacggctcaccatagacacactgcatgtgctgggtgatatattcgaccgtggccctgccccccaccgcattatggacatattatgcgattatcataatttcgacgtacaatggggaaaccatgacattttatggatgggagccgcagccggcaacgactgctgtatggcaaacgtgctacgcctggccatgcgttatggcaaccttgccgctctggaggacggatatggcatcaaccttctgcccctggccacctttgccatggaaacatacgctgatgatccctgcaccctgttcggaccgaaagtagagaaagaagactgtacgtacaatgccaagacgctgcgcatgataggccagatgcacaaagcaatcagtgttatccagttcaagctggaagcggagattatcaggcgccgccccgatttcgagatggacgaccgtatgctgctacaccgtatagacttcgagcgtaagaccatcacaatgcccaatggaaaagaatatgagctgaaagacagttttcttcctacggtagatcctgccgatccttataagctgacagacgaagaacgggaaattatgaacaaactccatcgttcatttgtcagcagtgagaaattgaaaaaacatatccgctgcctgttccgttacggatgcatgtacacggtgagcaactcaaatctgctgttccacgcctccattcccttgaatgccgacggtacgctgaaagatgtgtccatagccggaaaaacgtacaagggaaaagccttgctggaaaaagtagggcatttgatccgtaccgccttcttcgctgaggaagacaacgaggacagaccctttgctgtagactatgtatggtacttgtggtgtggcaaagactcccctgctttcgacaaagacaaaatggctacttttgaacgttacttcttaaaagagaaagagttgcacaaggaagtgaaaggtcactattacagcctgcgcaatgaagaaaaagtatgtgacatgctgctggacgagttcggcgtgataggaacacaccgccatatcatcaacgggcatgtacccgtaaaaaccatccaaggtgagaatccgataaaagcaaacggcaagatgatggtcatagacggaggattctctaaagcgtatcattcggaaaccggaattgccggatatacactggtataccattcgcgcggattccaactggtacagcacgaaccgttcacctcaatgcaaaaagccattgaagaagggcaggatatcaaatcgagcactcagatagtagaaatgagcacccaacgcatgatggtaaaggacactgacaaaggacgggaactggtgacacagatcaacgatttaaagaaattgctgatggcctaccggacaggacttatcaaggagaaatccatataaacagattatccgcaatcatactaccggataataaatgaaagtttattgccctatgattgcggataaaaaaataaagcccgtatcagactcacgtctaccgggcttttggattaccgaacaaaaatatcgttatacaatcttgttcatcgccgaatcggggaaaaccaccgtcggcttgaacgatttagcttcctcaaaatccatcatggcgtatgacatgataatcacaatgtcacccacctgtactttccgggcagcagccccattcagacaaatacatcccgaaccgcgctcacccttaataatataagtttcaaacctctcgccgttattattatccacaatgtgcactttctcgccggcaatcatgttggcggcatccatcaagtcctcgtcaatcgtaatactacccatgtaattcaaattggcttccgttacacggacacaatgcagtttcgactttaatacctcaatcatcataattctaatggttaacgatcactatcccttatattttatattatctatcaaacgtacctctccgcaaaataccgtaatgcaacctactgcataatccgtatcttcccaatccgttattttctgaagcgtagtgccgtctactatttcaaaatattccagacgcaaacccggagcggcagcaatcgcatcttctacaaacttctgagtctcagcgaccggatgagattttgcaaaagtacaactcttaaataaagtctgcgaaatattcagcgcatactctctctccaccgcagaaagccgtgcattgcggctgctcaatgccagcccgtcttcctcacgcacaataggacaacctacaatttccagtccgttgaaccctatctgtttcaccatttcacgaataatagccaactgctggaaatctttctcgccgaaataagcacgggtaggatttacaatcataaacagcttgctcactatctggcatactccattgaaatgtcccggacggaaacggccttccatcactgtgtccaacggcgcatagctgaactgccgggtatcaggctcaggataaatctcttctacagacggagcaaaaacaaaagccgcccctactttttccaacaattcacaatcggcatccaatgtacgcggatattttgccaagtcatttttgtcgttaaactgggtaggattcacaaaatcacttaccaccactacatcattttctgcaacagcacgtttcaccaacgaagcgtgtccggcatggagtgcacccatcgtaggtaccagacctattgtctttccctcactacgcagggcatccagctctgactgaagctctttgattgtttgaactaacttcatctttttatctcttttgtttgagtagtttcatttaaaacggctgcaaagtaaaccattatttgggagataacgaagaaaaaaaagaattttaattaatgatgagtaattagtaataagcggttaataccttgcagatatggcgcaataagccctcttcagccaccggcgggccacttgttctttcccgtttttcacctaattccgcaagacatcggccattaacttcaaattgctaacgactaattaccagccacttaacatatcataaggaattattattcctcgtttcttgccactctcatctattttttttatatctttgcaaaatgattatgagcaacaaaaagttaagatgaaggcaaataaagttttatttattacacaagagattaccccttacgttcccgaatccgaaatggcaaacatgggaagatttcttcctcaggctattcaggaaaaaggcagagaaatcagaacttttatgccaaaatggggcaatgtcaatgaacgcagaaaccaattacacgaagtcatccgcctgtccggcatgaatttaatcatagacgatacggaccatccgctgattatcaaggtagcatctatccaagctgcacgtatgcaggtttacttcattgacaatgacgactatttccagcaccgccaaatggtagctgacgaaaacggtgtagaatacaaagacaatgacgaacgtgctattttttatgcacgcggcgtattggaaacggtaaagaaattacgctggtgtccggacattatccattgccaagggtggatgagtgcatttgtacctctttatatcaagaaggcttatcaggatgaaccgtcattcagagactcaaaagtagtattttcggtatttgaagatgatttcaaatcggactgcgaaggtaatctgactgaaaaactcatgctgaaaggcattgaaaagaatgatgtggaaagcatcgtcaaatctccggcaaattacgaggagctgtgcaaactggccattgcctactccgacggtgtgatacaaaacagcgaaaaagtgaacgagaatgtcatgaaattcgcccgtgaatcgggtgtgcccgtgctcgactatcagcctgccgatacctatgtagatgctttcaatgagttctatgacaaagtatgggagtttgaaaagaaataactcactaagaataataaagatgaaaatcaaatacttatgcgcattgttgttggctgcacttatttatagttgcgatgattcaacaaccggcatcgggactgatcttatccccggtggagataagattccggcaaatacagacagttatgagtttaccaccaaatctctgttggccgactccgtttatgcacgtaccagtactgcatatttaggacgatataccgatgagcaatttggagaatttactgccgactttatagcacagttcacctgtatggacaacttcaaatttgaagaagagctgaccaaagtcatcggagtaaatataagtctgcaatacgggtctttctttggcgactcactgaatgccatgcgcttacaggttgacacattggacaaggttattcctgaaaaagaactaagcactttctataccagtgtggatcctaaagattattataacgaaaaaggaaagcctatcgctgtaaaagcctattcggcagtaggtccgtctacaagcaaagatgaaactacaaccacaagcagcggtgtcaagcaaagaacaattatacagactatcaaattgcccaattcattaggcgatcacatcttcaacaaatacaaggagaacaaagagtatttcaagactcctgaaagttttatcaagaatgtattaaagggagtttacattcgctgtactcatggcgacggaaccattttatacattgacggtttaaggctgaatcttaattttgaagccctgatagaaagttcttccggcaagcgggattcgttggtttacaaatcctatttctttggagcaaccaaggaagtgatacaagccaaccacttcagtaacggtaacagattggaagagttagcccaagatccggaccatacttacctcaaaagtccggcaggtatttttacagaagcgactttccccattgcagagatttacaatgaacataaaagagatacgctaaatggtgtaaatgtatcattcacacgctacaacgagaaagagtccaaatacaaaatgggcatcccccaatatgtattgatggtcagaaagaaagatatgttctcgttctttgaagaaaacaagattatcgataacaagacttctttcttaagttcatatagcagcagtaacaatacatacacctttaccaacatcgctcccttaatcacttactgcattgaggaacggaaaaaaggcataacagcagcaggtggagatcctgaaaaggaagaagacggaaaagaatgggacgctaaaaatccggactggaacagagttgtcatcatacctgtcaaagcagtatccaattcaaacaatgaaatagttgaaatatccaacagcttaggtatggaaagcgctatgttaaaaggtggaacgaatcctgagaataagctgaaaatgcaaatcttctacactacattttaagacttttttatttaaccaaataaagaacaggcggcaactacagcaatatagtttccgcctgtttaatttactccaccgtaatcataccacaccggatgataaatggaaattcatggaacgcaaatatcccatcaacacttcacaccatgattgagaatgaccataaaaacagactatataaaataagccggcaaaatccttttcacggatcctgccggcttatttatgtttatgggaatcctctatcccctagaaaggcaaatcatccttctcgtctgtcgcggcaaaatctaccggtgcagcgggagcagcattcatgggaggaaacggagcatccggtgcaacaggtccctgggcacccacacgctctactttccacgcacggatactgttgaaccaacgaccattccactcgcgggcatccacatcaaaaaacacattcaactcttcacctgcctgaatattaaattgcgctatcttatctgctccaaatacgtcaaaacacatttttttaggatattgatcatgcgtttcaattacgtattcttgtactttccattcatttcctgtctttgaaactcctcctctcggttcgaggactgctattacttttcctgctaattccatattacgttatttaaattcgccacgaaagtacacttttccttgcgagtaaactaattttttcgccattttttgcgcttgaaccataatcttttcgtaactttggcagttaaatgaatatagagatatagaatataaatataataatataaaactatgaagttcatcgtttcaagtactggattattcagtcatttacaagctattagccgagtaatcaactccaaaaattcgttacctattcttgattgtttcttaatggaactgactgacggaacgttgtcgctcactgcctctgacagcgaaacgaccctgtccacttctttggaagtaaatgaaagtgacggtgacggacgctttgccgtttcttcaaaaaccatactcgaagccctgaaagaaatacccgaacaaccactgactttcctggtaaatacagagaatctggaaatcaccgtacaatatcagaatggtaaatacagcctgatgggacaaaatgccgacgaatatccgcaggctcccgcattaggcgcaaatgcggtacacgtaacaatgggcgctccggtgatgctggcaggtatcaaccgttctttgttcgctactgccgatgacgagttacgtccggtaatgaatggtatttattttgatatcactaccgaagacatcactttcgtagcctcagacgggcacaaattagtacgcaataaaacatttgtggcacacggcgatgaaaaagccgctttcattctgcccaagaaaccggcaaccctgctgaagaacctgttgccgaaagaacaaggagatgtgcaaattgattttgacgaccgtaacgctacgtttacattagaaaactacagcatgatatgccgtcttatcgaaggacgctatcccaattataattcagtaattccgcaggataatccgcacaaggccaccattgaccgcatgatgctgatcagtgcgctccgccgtgtatctgtattctcatcacaagcaagcagtttgataaaactccgcctcagtgaaaatcagatccagatctccgcacaagacatagacttctccacctcagcagaagaaacactgacttgccaatatacaggaagccccatgagcatcggctttaaatcaacattcctgatcgatattttaaacaatatctcggcacaggaaatacttttcgaactggctgatccttcacgtgcgggtgttattgttcctgtagaacaggaagaaaaagaagacctgctgatgctgctgatgcctatgatgctgaacgactaaaaacgacacgccaccatgtggcggaaaaacaatatataatacaagctgaaaatgaaattgaacttgaagaatcctattgtttttttcgatttggaaacaacgggaacaaatataaacacagacagaatagtggaaatatgctatctgaaggtgtatccaaacggcaacgaagaaacgaagaccatgcgtatcaatccggaaatgcatattcccgaacaatcttctgccatccacggtatttatgacgcagatgtggcggactgccctactttcaaggaagtggcaaaagagatagcccgggacattgagggatgtgaccttgccggtttcaattccaatcgtttcgacattccggttctggccgaggagttcctgcgcgcaggagtagacattgacatgatgaaacgaaaattcattgacgtgcaggtgatttatcacaaactggaacagcgcaccctgtctgccgcctataaattctattgcggaaagaatctggaagatgcccatacagccgaagccgacacacgtgccacatacgaagtactgaaatcccaattggaccgctatccggaagaattgcaaaacgatatggcatttctagccgaatattcaagtttcaacaagaacgtagatttcgccggacgcattgtttatgatgacaaaggcgtggaagtctttaattttgggaaatacaaaggaatgtcggtcagcgaagtattacaaaaagatccgggctactacagctggatactgaacggtgactttacgctgaacacgaaaaacgtactgacaaaaatcagactacgtgaatcgggaatgatgaaatgagtatgaaaggaaaaaaaatcgtactaggtataaccggaagtatagccgcctataaagcggctatactcattcgcggacttattaagaagggagcggaagtacaagtcgtgattacccccgcaggcaaagaattcatcacacctatcactttgtctgcattaacaagcaaacctgttatcagcgagttttttgcccagcgtgacgggacatggaacagccacgttgatttgggactatgggcggatgccatgattatcgctccggctaccgcatccactattggtaaaatggccaacggaatagcggacaatatgctgatcacgacttatctgtcaatgaaagctcccgtattcgtagctccggcaatggatctggatatgttcgcacacccttccacccggaagaatctggacacgctccgttcttacggaaatcatattatagaaccggcagaaggggaactggcaagccatctggtaggaaaaggcagaatggaagaaccggaaaaaatagtggaaattctggaagctttctttgccaaacaacaagacatggccggaaagaaagtagtcattaccgccggtccaacctacgagaaaatagatccggtacgctttatcggcaattattcttcaggaaaaatgggattcgcacttgccgaggaatgcgcttcacgtggagcggaagtatcgctaatcagcggaccggtaacgattcaggcccatcaccctaacatccgccgcatagatgtggaaagtgccggagaaatgtacgaagccgccatccgcgagtttcctacagcttcggccggcatcctgtgtgcggcagtggccgactttaccccggaaaccgtagccggtcataaaatcaaaagagagaaagataatttaacactgcaactgaaacccacacaagacattgccgccgcactgggaaaccggaaaaaagacggacagacattagtgggatttgccttggaaacaaatgatgaaacaaaaaatgcacaaagaaaactggaacgtaagaaccttgatttcattgtactgaactcattgaacgaccaaggagccgggtttcgttgtgacaccaacaaaataacgattatagaccgtcagggagcaactccttatccgctgaaaagcaaacaggaagtagcaagggatattattgacagactggtaaataataaataatttcttaatttgccacgttgccaatgtgctaatgcgctaattaccatgcggaatacaacagcgcagcaaattagcaaattgacaaatcagcaaattattaaaaaggagcaagaatatgctgcaatctatctatatacagaattatgcattgattgatacattggatatcagtttcacccccggcttctctgtcatcaccggagagaccggcgccggtaaatcgattattctaggcgctatcggcttgttactgggacaacgggccgatatcaaagcgatcaagaaaggcgccaataaatgtattgtagaagcacgtttcaacatctccgcctatcagatggagcctttctttacccaaagagatttggaatatgatccggatgaatgtattatccgccgcgagttatatgcatcaggtaaaagccgcgcattcataaacgatactccggcctcattggcgcagatgaaggaactgggcgagaaactgatagatgtacatagccagcatcaaaacctgttgctcaacagtgagggattccaattgaatgtattggatatcctggcacaagatgacaacgaactttcagcatacaaggatatttataccgagtacagaaacgtatgcaaacagctggccgacttcataacgcaagccgagcaaagccggaaggatgaagattacatccggttccaactggaacagctggatgatgcaaaccttcaggaaggagaacaaaccgaactggaacaggaagccgaaaccttgaatcatgccgaagagataaaagcgggtttgtacaaagtggaccaaataatggcttcggaagatgccagcctgttatccgctaccaaagaatgtatgcaaaccctgcataacatagcgagagtgtacacacgtgcccaggaatggatagggcgtttagacagttgttacatagaactgaaagatctgtcgcatgaaatagcaggcgcacaggaggaagtggagttcaaccccacccgtctggattatgtaaatgaacgcctgaacttaatctactctttgcaacagaagcatcacgtacaaacaatagaggaattgatagccgtgcaaaccgactatcatgagaagctgaacgccatcacttcttttgatgaccgtatagcagaacttaccgcccaaaaagaaacgctatatgacaaagtgataaagcaagctgctgtgttgacaaaactccgttcccaatcgggcaagcacattgaaagacagatgcaaagcctgctggttcctctcggtatgcccaatgtgcgctttgtggtggaactgaatccgcgcaaggaaccggacagtaaagggatggacagtgtgacattcctgttttcggccaacaagaatggaacattacaaaatgtagcttccgtagcatcgggtggtgagattgcccgtgtcatgctttcgctgaaagccatgatagccggagctgtgaaactgcctactatcatctttgatgaaatagacaccggagtttccggttccatcgccgaaaaaatggcgctcatcatgcaggagatgggaaaacaaaaccgtcaggtcatcagcatcacccacctgccccagattgcagcacgcggcatcactcattataaagtatataaggaagatacggaaacaggcaccaacagccacatccgccgcctgactgatgaagaaagagtaaaagaaattgccaatatgctaagtggggctaccttgacagaggcagccctgaacaatgcaaaggcgctgataagtggctagtgccaattaccactaaccacctgtcactaaccattaaccacttattaaatatgttagaaaagaatgaaatgattttcggtgtacgcgctgttattgaagccatacaagccggaagagagatagataaagtattggtgaagaaagatatacagagcgaactgtccaaagaactgtttgcctgcttgaaaaataccctcatccctgttcagcgtgtacccgtggagcgtattaaccgtattacccggaaaaaccatcagggagttgtagcattcatctcctctgtcacctaccagaaaacagaagatctggtacctttcttgtttgaagaaggaaaaacacccctattcgtcatgctggatggaattaccgatgtacgtaacttcggagccattgcccgtacctgcgaatgtgccggtgcagatgccattattattccctcgaaaaacagtgtcagtgtcaatgccgacgcaatgaaaacatcagcaggagctctgcacactcttcccgtatgccgcgaacaaaatctgactaataccatcaagtatctgaaagactgcggattcaagattgtagcagccacggaaaaaggtgattatgattacaccaaagcaaactataaagaccctgtatgtatcattatgggagccgaggacacaggtgttccctacgaacacctttccctgtgcgatgaatggatcaaaataccgttaatgggtaaaatagaatcattgaacgtatcggttgccgcaggtattctgatttatgaagctgtaaagcaacgcggcttcacagaagacaaaacggcatccgctttataaataccgtatcatcgttaacaaacaactaactatatcatgaagaaagtacttttgatactggcatgcggcatagccgcccagctaagctatgcacaagcaaccccaaagtgggccggcaaagctaaaaaagccgttttttccatcgttacatacgataaagataacaaaatcaagaatacaggaaatggattctatatcaatgaaaatggaacggcattatccgattataccctgtttgaaggagccgaacgtgcagtaatcattaatgcggacagtaaagaattgcctgtattgcgtatcttgggagccaactccatgtatgacatcgtaaaatttaatactgaaaccgataaaaagaccatagcattaaaatcggcatcacagccggcatcggtaggtgaaacagtctatctgctaccctactcgactcaaaaagcggcaacctgccagacagggaccgtcaccaaagtagacaccatcggcgacaaggcatattactatacactggcaatgacaaccaacgaaaaaacagtaagttgccctattatgaatgccaatggagaagtattaggtttaatccaaaaaaacgcatcggatgaagccaaggaaagttatgccatcggagctacatacggtgcctcgctgagcatcaccgccctttctttgaacgacatgtcactgaataaaatcggcatcaaaaaaggactgcccgaaacagaagaccaagcactggtgtacctgttcatggcatcttcacaacaaaatcaggacgaatatatcaccacattaaacgatttcctggaacaatatcccaacagcgcggacggatatatacgccgtgccactacttatatgggatttaatgatgatgaacacaacgctttggcagatgccgacctgaagaaagcactggaagtgacagccaacaagagtgaaacgcaatataatatcgctaaattaatttattcgtacaccatctctttaggtgacaagaaaccatacggtgactggagttacgacaaagctctctccattattcatgatgccatgcaggccgacaaccaacccatttacacacaattggagggagacattctgtttgctatgaaaaaatatcctgaggcatacgccgcttatgaaaaagtgaaccagtcttccatagcctctgccgctacattttactcggcagccaaaaccaaacaactgattgaaggaacagatatgaacgaggttattgccttgatggatagtgctgtggcacgtttcaccaagccttatacatcggaagcggctccttatttctatgaacgggcagagataaaagcccagacaggcaaataccgtgaagcggtaatagattatgagactttttatgatgctatcggtggacgcgttacagccgccttttatctgcaacgcgaacaggcggaaatacaatgtaaaatgtatcagcaagctatcaacgacattaataaagcagtagaaatgactcctgaggatatagccatgtgggtggaaaaaggttcggtgcatctacgtgtagggcaacataacgaagcaatagaagcattggaaaaggctatctctttagacccgaaagccgcagccgcatatcgtatgctgggatactgccagatacaattaaagaaaaacaaagaagcctgtgcaaattttgccaaagcaaaagaactgggcgatgaagtggtagacggactgatacagaagtattgcaaataataccgggaagctccatctgaaatccgcgaatcttgctacatgatttctgaaatcttgttgcatgattcgcggatttttgctacaagatttcaggaaacattccctgtcattcatgaaaaagcaggaaagaaaaaaattctacttatcttccaactgccgtataatcagtacccgtttcgtatcttccgtcacccggaaacggtcatcgctacgctctcctaccagccatacaatccggtctgctgagcaaaccacatactgattttctttctggaaaagagaaaacttacgatctgtcagataatcgctgaccttctttttccctttcattccgaaaggaacaaacttatccccctgcctccatttacgcaccgtgagaggtagcaccaccttatccgcatccaaacaggccgtattcttattcctggggatgacaaagtccggcattatttcctgcgtttccattgcaagccggaatgggggcacattttcctccacttcctcatccgccggcttcctcctgcgaataatcagctccgtcctgtcgcgcagcacctcccatccggcagaaacgaatctttttcccgactgggcagacaaactgcggaatacatctcctacctgaacggaattgaaacctaacggatgaagaatctcaaacagcaaagccgccggagcactctcttccatcaaacgagaaataagaatatggccggacttttccatcaccctttctttccccgcctctatttccttattatatataagagaaacatcagtcagacgtctggatgtttcagctatactttcactgacagaaggattcagctcacgcaacatcggaagaatattcagacggattttattacgcatatattcatcttgcagattggtactgtctgtaacataaccttgacgcaaacaacgcaaataatccaaaatatcctgacggctcacctccaacaaaggccgtacaatacagccgttatgcggactgatacctttcaagccattgattcccgcgccacgtatcaaattcaataaaaaagtttccacactatcgtcccgatgatgggctacggcaataacagccatccccctctccttacgcagttgttcgaaccaatcatagcgcatttcgcgagctgccatctcaacagaaacatgatgccttgaagcataagtgactgtatcaaaatgagtaacatgcaaagtcactcccagccctttacacaactcattgacaaacctttcatctctatcggactcctcaccacgaagatggaagttacaatgggcagcctcacaatgataccctaaaacaagcaagacacgcaacaaagctaccgaatctgctccgccactcaatgccactaacaccttatcatgcaaagtgaaaagttgtttttcctctatatacttctgaatattccaatgaaacatgacacaaagataagggttctgcaagacaaaaacaaagtgcctgttctttatttaaaaacaatctaaatagtttgcatacttctaagtaataacttatctttgcgaaaaatttaaaacaagatgcgtttatccgaattaagaacaggagaaaaaggcgtaatagtcaaggttttaggtcacggtggtttccgcaagcgaatcgttgaaatgggttttattaaaggaaaaaccgtagaggtaatcttgaacgcccctttgaaagaccctataaaatacagactactaggttacgagatctctctccgaagacaagaggcagatatgattgaggtggtaagcgagcaggaagcacgcacgatgcagaacccttaccatggttccataacagaagatgtacccgtgtccgaatcagaactggtggcactggcaaaaggcaaacgccgtacaatcaatgtagccttagtaggtaatcctaattgtggaaagacttcgctattcaatattgcatccggcgcccatgaacatgtaggaaactacagtggtgtgacagtagatgccaaagaaggttttttcgacttccaaggttatcatttccgtattgtagatttacccggaacctattctctttcagcctatactccggaagaactttatgtacgcaaacatatcattgaagaaactccggatgtaatcatcaatgtggcagactcttccaacctggaacgtaatttctatcttaccacccaattgattgacatgaatgtgcgtatggtcatcgcactgaatatgtatgacgaactggaaagcagcggcaacaaactggattacatcaagttaagccaattgatcggagtgcctatgatacctactgtctgccggcggggtgaaggcatagaccaactgttccatgttatcatcggtatttacgaaggcggggatttcctgtcacaaaagggcgaaatacgttctgaaattctggaagatctgagagactggcacaaaacctatgtacccgaccacgaattcggaagccacaaagaagaggaagatgcccgcccacgcggatatatgcgccatattcacattaaccacggtcctgaactggagcgcagtatcgaagaagtaaaaaaagcaatcagtcaaaacgaagacatacgccataaatactccacccgcttcctatctatcaaattactggaaaacgataaggaaatagaaaatttcatctctacactgcctaatggcaaagaaattatagcgatacgcaacaaggaaaccttacgtatccgtaaagtgatgaacgaagacagcgagcaagctattacggatgctaaatatggttttattaccggagctttgaaggaaacattcaccgacaatcatttggaaaaagaacaaacaacccgcgtgatagacagtattgtgacacatcgcatttggggatatcctatttttttcctgttcctttacatcatgtttgagggaacctttgttttgggtgactaccctatgcaaggtattgaatggctagtagaccagttgggcaacctgatacggaacaatatggctgaaggtcctttgaaagacttactgatagatggtattatcggtggagtgggcggtgttatcgttttcctgccgaatatcctcatattatacttttttatttctatattggaagattcggggtatatggcacgcgctgcatttatcatggataaaataatgcatcggatgggactgcatggcaagtcctttattccactgattatgggattcggctgtaatgtacctgccataatggcaacacgtactatagaagaccgaaagtccagactaatcaccatgttggtgaatcctttaatgtcctgtagtgctcgtcttcccatatatttagttatgataggtgcttttttccctaactgcgccagctttatgctactttgcatctacacagcaggcattttattggcagtaataatggcccgtattttcagtaaatttctggtgaaaggagaagattctccatttgtgatggaactccccccctatcgtatgcctacctctaaaagtatcatgcgccatacatgggaaaaaggagcacaatatctgaaaaagatgggaggcattatcatgattgcctcaattattatctggtttctagggtattatccacaacatgatgcttacgaaagcgtggctgagcaacaaaaaaattcatatatcggacaaataggcaaagccatagagcctgttatcaaaccgctaggatttgactggaagttaggaatcggacttatttcaggtgtgggtgctaaagaactggtagtaagcacactaggagtattatacacaaatgaaggagatgtggaaaatgtgaatctttctaaccgcatccccattactccactggttgcattagcttacatgctatttgtattgatttacttcccctgtattgccactttcgcagcaatcaagcaagaatccggcagttggaaatgggccatattcacagcaggatacaccactggattggcttggcttattgcatttactgtatttcaaataggaagtcttatcgtttaataaacctaaacctaaaattatttgtttatcaagcatggaattacaacaaattatagttattgcaattgtatgcctctgcaccatatggataagcatacgtatctttcagtatttcaagcgcataaagaacaatagcaatccgtgtgaatgctgtagttcggactgcgccatgaagtctatgcagaacaagccaaagtacggttgcgaaaaaaatgcagaaaaagtgagaaaaaaatagcagaatatttgcagattaaaaaaaatgtcgtacctttgcaaccgcaatcgagaaacaaagattgctaacgacaaggttccttggatgagtggcttagtcagcggtctgcaaaaccgtgtacggcggttcgaatccgccaggaacctccaaaagcaagaaaggattagaatgaaaatttctaatccttttgtttttcagcaacttacgtcctctgtggtagaagtagagaagggtgggctttccacccccgcgactccactggagatgttgaggctttatagctccctctataaattatattacagacatccatctgcatgcgaaatcaaacaacaaaccgttttcaccccgtatgacgaatgtgaatattttatggacgggtgcgatataatgttagatcaactttattcttatcccctgggattaaaatgcattatatgccatgagcaaaggaattatagttgtaggaggtgcagaagaggaacattacaacttattaggcaaagacagacttcatcctatcatcaacgtataccctgaagaaaatgacatttataataaactagatagtttattagctaacccaaatttctcaattatccgccgacagcattgaatatatcaaaaaataccattgcccaataaggtggctaaagaatgtttggatttttgggagaaaaattaattccatccattagcacttcactatcagcatcttattacttccatcaaaaaaatatatctaaaaaaagagcaaaatgtttgcataattcaatttatccccttatctttgcaccgcgtttgagagataacgcttctgaaaagaaggaagtttgggtgagtggctgaaaccaccagtttgctaaactgacgtacgggtaaccgtaccgggggttcgaatcccccagcttccgcaagcgggtcataaaagtagtttatgacccgcttttatttttcaatgatttgagatcaaggctttcggaagccctaaaaagacgactcaaaatacttcattaaaacttcagggaagataaccagtggtaacttatgtagattgcgatcagaatcgcattgggttgttttttttaatccaaccgcactgatagcttactttcgcgtattaacataacatacccacagttttttcggactgaccattaaattcctattttatagtaacagcactaaaaaaatcattttttattttgcagattaaaaacaaacttttaactttgcagcgtcttagaaaaagagttaagagcaactgatggcggtatcgtctagtggcctaggacgcggccctctcacggctgaaactcgggttcgattcccggttccgctacctttagaagctaattggtttattgtcaccaattagctttatttttttataaaactaaaataaaaagagtacttatcattttttcatttattgactactttatacttaaaaatgcacaagcattcgcattatacctactaatagtgatgcatagctcacaaaaaaggagtacctttgcagccctaaatcatcttaataatgacagtatggaaatgaacaaagtttttaaggatggattgtggagtaaggaaattaatgtttcagacttcgtatataccaacattaccccttatgagggcgatgcctcattcttggcaggccccacagagcgaactaaaaaagtgtggaacgaatgcctcaaggcactagaagaagaacgtgccaataacggagttcgttcccttgataatgtaacagtatctactatcacctcacataaagcaggatacattgaccgtgaaaacgaactgattgtaggtcttcagacggacgaacttctgcgccgtgccatcaaaccttacggtggtatcaaggtcgtagaaaaagcctgccatgaaaacggtgtggaagtagatgaaaaagtaaaggatatctttactcattatcgcaaaacccataatgatggcgtatttgatgcttataccgaagaaatccgctctttccgttcactcggtttcctgaccggtctgcccgataactatgcacgcggacgcattattggtgactaccgccgtttggcactgtatggtatcgaccgactgattgaagcaaaacaagaagatttgcgcaatatcaccagtccgatgaccgatgcccgtatccgcctgcgcgaagaagtagccgaacaaattaaagcactgaaagaaataaaaatattgggtgaatattacggactcgatttgagccgtcccgctactaatgcacaagaagcggttcagtgggtttatatggcatatcttgctgccgtgaaagaacaagatggagcagctatgtcattgggcaacgtttcttcattcctggatatctatattcaatatgatttggatcatggtaaaattgacgagtcattcgctcaggagctagtggatcagtttatcatcaagttacgtatggtccgccatctgcgtatgcaatcatacaatgacatctttgcaggtgaccccacctgggtgaccgaatctatcggcggacgattcaacgacggacgcaccaaagtaacaaaaacttctttccgcttcttacaaacactatacaatctgggtccgtcacctgaacccaatatgactgtactgtggagtccggagttgccggaaggtttcaaagaattctgcgcacaggtttctatcgacacttcttccatacagtacgaaaacgatacgctgatgcgcgaagtgcgtaactgtgacgattatggcattgcctgctgtgtgtcttatcaggctatcggcaaacaaatccaattctttggggcacgctgtaatctggctaaggctctgttactagctatcaatggcggacgttgcgaaaatacaggaactgtaatggtgaaagatattcctgtattgacaggagacttgctgaactttgaagaagtatggtctaattataagaaagtattaatgcagattgcacgtgtgtataatgatgcgatgaatatcattcactatatgcatgacaaatattattacgaaaaggctcaaatggcattcattgataccgatccacgtatcaatctggcatatggcgtagccggtctgtccattgccattgactcattgtctgccatcaaatacggcaaggtacgtgccaaacgtaatgatataggtttgactgaaggctttgatattgaaaatacatatccttgcttcggtaatgatgatgaccgcgtagaccacttaggagtagatttggtttatttcttcagtgaagaattaaagaaacatccggtatacaaaaacgcccgtcctaccctgtcactgctgactatcacctctaatgtaatgtacggtaagaaaacaggtgccactcctgacggtcgtgccaaaggggttgctttcgctccgggtgccaacccgatgcacggacgtgataagaacggtgccatcgcctcattgagttctgtagccaaactacgctatcgtgatgctcaggacggcatcagtaacacattctctatcgtaccaaaatcactaggggtggatcgggaaacccgtatagagaatctgataaccatgatggacggttatttcaccaaaggggcacaccacctgaatgtaaatgttctgaaccgtgaaatgctggaagatgcaatggagcatcctgaaaaatacccgcaacttactatccgcgtatcaggttatgccgtaaatttcatcaaattgagccgtgaacatcagctggaagtaatcagccgttctttccacgaaagaatgtaacatcacatatacattaatcgtaggggcgggttttaaacctgcccttaccagtttaaaaacaaatcattatgatcagagtacattcttacgagtcaatggggacgtttgacggtcccggcttacgcttagtcgtatttttacaaggatgcaatttccgatgtctctattgtgccaaccccgacacaattgacaccaaaggtgaaagtacggaaacggcaatagacgaaattgtgcatatggctgtcagccaaaaagcttttttcggtaaaaaaggaggtgtgactttcagcggcggcgaacctacattgcaagcaaaagcactaattccgttattccagcggttaaaagaacaaaacatccacatctgtatagataccaacggcagtatatggaatgaggaagtagaggaactgctaaaatggacagacctcgtattattagatatcaaggaatttaataatgtgcgtcatcggcaactgacagaacgtagcaacgaacaaaccatacgtaccgctgaatggcttgaaaaaaacggaaaacctttttggttgcgctacgtattagttccaggctatagttcctttgaggaagacatacgggcattaggagagcacttcaagaactatcacatgattcaaagagtagaaatactaccttatcatacattaggcgtacacaaatatgaagccatgggaaaagaatacaaactgaacggaataaaagaaaataccctagaacaattggaaacagccaaaacgttatttggtgaatatttcaataccgtatatttaaattagaaaagacaaacttaccgtctatccggtacttaagttccgttaaggagatgagccccataattttcgcctcatctcctttttatgtataagaaacaatatatttatatcagcactaccatcacatcccgtgccccatgagcacccattaccaaggcctgctcaatatcagctgtctttgacggaccggaaataaaggttccgaaaccatattcgcctgtatctatcagtttatatgcttcatgcatattgttcacaatcttattcttatctagaagaataaccaacttttcggcaataaaataaatggcacgctgctttacatcctgctctatccataccgcaccattctccgcaaccccaatctttccatctatgacagccaaatccgtcccattcaattctgcaggatcttccaaatcatcgggattaaatgttgcacaagtaatactcttcagattagaagcgatgcgtttggctccaggataagcttttttaatgaaatcattcacgttctcctctttttccaaaaaaatggcttctcctcctacttgcttcatgacgaaataaaactgttctaccttactgggataagtcaatgccatatcttccaatggctttaaatccggtttctcatattttacatgtgtagcacgccggatgctctgcaatatatcttctctgctgctcataatttacttcactttacctttcttccacatttcattgaaactctccttagcaaatttcggcatttcacgtcctttcccccagtcattcaatccgttatagataagaaaacgcggcactccgtttaccaatggcgcccattttaatgccatattgaatatcgaagggcggttcatcatgaattccatgccaccggacattacctttttcatccggtctgccttacccaatttatccaaatcctggcgccacaaatagatctgctccgccaaatccactttagccggacatacaaacgaacaggaataacacaaagaacaagccgacacattgtcataataatgtaacggcgccttcaacatccccaggttaatcccgatagggccgggaataaaataagtataagagtaccccccactacgtctatatacaggacatgtattcatacaggctccacaacgaatacaattcaaagtcttgatatgctttgggtcggctaatatcttactacgtccgttatctacaataataatatgaagttccccaccctctctaggctttcgataatgagaagtatatgtagtaatgggttgtcctgtagccgaacgggccaacaaacgggtgaacactcccaatgattcacgatccggcacaattttttccataccaaaagccgcaatctgtaatttaggctgggaagtacccatatccgcatttccttcattggtacataccacaatctcaccagtagaagctacagcaaagttagcacctgtcatagccgcctcagcatgaataaatttctgacgaagatttttccgggctgcatgtgtaaggtaagtagggtcaaaatttcctttctccgtacccatctcttgctcgaaaagctcacctacctgttcacgtttgatatgaatagcaggtaatacaatatggctcggcttcagatgcatcaattgcaagatacgctctcccaagtcgctttctaccacttcaatccctttgctttccaaaaagggattaagttcacactcctcggccaacatggatttgctttttataaaatgcttcactccgtgctggttcagaatattgtagacaatattacaatactcatccgcatcctttgcccaatagacatgagctccgttagcacgcgcattgttttcaaactccaccaataattcgtccaaatggctgttactatatagtttagtagcacatgccatattacgcaattcctcccattcgggaacttctttactcagtctgtcacgctttgccctaaccagccaaagtgtttcgtcatgccatgcggcctgtttcttgtttttcagaaactccgcagctgcttttgaatgtttcgtactcataatcctgccgctaagatttcaacaatgtgcaatgtcttgataggaagtttgtcacgggcaatgataccattctgatgcatcaggcacgaactgtcggcccccacaatgtattcagcaccggtagcaatatgacgcatcaccttgtcatgccccatctgcacggaaaccgcatcttcctctacggcaaacataccgccgaaaccgcaacattcgtctttgcgttccggttccacaacttccactccttctactaaagagagcaaatcacgcaatttgctgaaataaggaatattaagttcgctggcagaagaaagtttcatcaatctcactccatgacaactgttttgcagactcactttatgtggaaacttggctttcaacgaagaaggcttgacgatatcatgaataaactcacagatatcatatatcttaccttcgctggcacaccgatgtttgtcttctttcaacagacgactgtagttatcacgcacaaaaacgacgcaactggccgaagggcccactatataatcgtaattcttaaactgttcgtcaaaatgacgggccaaatctaccgctttattctcgaaacctgcattcgccatcggttggccgcaacaagtctgattgagaggataatccacgtccactcccaaacttttcagcagcttgtacgaggctatccccacctgcggatataccgcattgatataacaaggaataaataaacctactttcattgtcattagttaatatgtgtcctatattgaataacaaagttagaggatatttgttaagaaaacaacgagatttctaacgaataatgaagcggaataggtaaaaaagcataatattgtgagcaaaagccttactaataaaaaagtactccccgcgaatcacttcgcagggagcacttttaactaataactaactttgtggtttacgtaatttctatatgactaacttatagtgcaaagatagaggttagggaccacatccacaatcacttcatttaggtattctatcttattccactcaccatttgtaggtattataagttcatcttcacctcgcttagttcaaccagtttatttacgatagcgtaaatagtcaatccggcaggtgaatgtatttgtagcttgcgcgcaatattccgacggtgagttatcaccgtatgaatggagaggaacagtttttccgccgtttccttatttgtcatcccacgtaccacgcaacaaataatttctttctcacgctggctcaacgcttcctgttcgccatctgtttcatccacaccaagattcatcaggtctactaactttttatttaaaacttcgatgtcatcatatagcgctatactctcatcgtatcccttcaacagattggtatctgtgactgaacacaacaacgaaacgcatttgacagatgcctgtggatagttcgatttgaactcgtccacgttaaaccatcctccgaaagtaggatttatgattagaatatccggctgatgtccctgcatacaattttgcagtccttcaagagaagttatttccaccggctgtattataagatcaggcatgcgcttcagcacagccacaagtccgctacgcacaatgactgaagtttcggccaccgcaacgtgcacaagttctgtccgtttcatttcccctccttttccagcctaagtacagcaggcacaaacaagtaatcctctacgcggcaatgagatgccaaatcttgttcacaactgaatatgtcgaataatacggcgttcaacaaatggttatttccttttgccggataatatttaataatgatgttttttaactcagtcagtgtcgcatctatctgatcatgcctgcgggcaaactgtgagatacggaatcctcccgtttctcgtcccgtcatcagattctctacataagtaaacacattcatatcttcataatccatgtgtttacgcacttctccggcatactgatcaaaaaatttcagaatgagaaatgcaacctcgttttccgtggaacaatctatagcttctatcaatttacggcgtatggtaggcagacagaaatcaaggaaataatgatgtgcctgttttaaataattcatcaatgaaggcatagaaatatccttcacatcatcctccatccggtcgctatcttcaatcatgaagtttaccaccgcaaggaaagtacgacaatccactccattttcacggcacacctcctgtactgtcttgtctccaaaccctaacgaaagatcaaaacggctcattacctgtagcaatgtatagttatcacagataagataactcattttgtccgtcagagtatatttacttgttttatacatagttatgttttttgtttctctttatggccgcaaagttacggaaaatcaccagggttatcaatcactataaataggtattttctcttgtacccataattcccgttcaaccggccaatgccagtcttttaattatacattaatatatagccgttaagataagtggcaagaagcaaccacaaaagataaggaacaaaaagatatgccgaagatttcctcaccggataactttctatcatataataaataacaagcacatccagcaccagaatatttgcaaaacctagcaacggactccgaaaataaaagaagaaaatgctccatgtaaaattaaacagaagctggaatccgaataatctgataatcatttgtcgtcttattgtccatatatgccaaatcaacccgatagaaattcccatgcacagatagataaaactccaagcaatgggaaaagctatatcagggggggtacaagaaggtttttccaatgcaggataccagttgagtatagactccgactgaaaataagaagcagtacagcctacactaaaacagataagtatagcaatcagtatggggattattcttttcataaggagaattatttctatttatgccataattaacaaaccaacctccggatttgttgcagaaacagaacacttctcccctgcaggtatctaaaaaacgtgctcccattcgttcgcttacgatgggagcacttacaacacaaaaactaaactagacttaactaaactattctattaagaagtttcacaacttcccttgtctatgctgcaaatataaaaagattatttcttttttgcaaaaggatatcgacaaaatatcaacttttatcattcaaatatcacatttttcaaacagaatgactattcaaatatatctgtaactcctgtttataactatcggaaatcggaatatactctttaccgaaaacaatccgcccccgatcaagcaccttaattttactcttttgcactataaacgagcgatgtacacgaataaaacgactggaaggaagcttctcttccatagctttcatactgataagtgacaggatagctttcggctcatcctccacatgtattttaatataatccttcaacccttctatatacaatatccggtctaaagcaattcggagcaatttataatcactttttacatatatacaatcatccgcctcatcggcatcaacaccattatccgccttttgtttcaattcataccattgcaccgctttattcactgattgcaaaaaatcgacatagctgataggtttcaacaaatagtccaaggcattgactttataactatccaaggcatactgtccgaatgcagtagtaaaaataattcttgtttcaggactgaccatgcgtgaaaactccaaaccgttcaactcgggcatttgaatatcaaggaacaagacatgcacctcctcgtgaagaggaatttctgtcatagcttgcaccgcactggaatacctccctaccaaccggaggaaagacgttttttccacatagcttttcagcaattccaaagccagcggctcatcatctacaatagcacaattcagtatcataaacttttagtctgtatagttaatatagaagaatatacctgtccgttttcactgatcccttttatccattcgtaatgtcccggataaatcagttccaaccgcttgcttacctgttccagccccactccacttccacttttatcttgcccggacttcggatgattgctgttaaggatctcacatctcaccgtaccatccgtatgcccaaagatagagatactgataaaactgtctaccgtggggctgataccatgcttgaaggcattttctatcagcgatatgaaaataaggggagcgatttgcaacgcacctccagaatctgcctccaaattcacactcacttctacctgctgtggcaagcggatacgcatcagagctacataattacggataaagtccaattctttttcaagcggaacaaaagtctgctgattgtcataaagcacatgccgcaacaatttactcagctcttgtactgcctcttgtgccttgtcactattaaaagcaatcaaagcatagatattatttaatgtattgagcagaaaatgaggattcaactggttcttcaagtttttcagttccgcttccgtcttttgtctctccgcttctatcaaccgctcttccgcctgacgccaacgcaggctggtacgaatggccgcacccaatccggcaacaaaaatcatcatccccatatcccgcgcataaaatatccaacggggcggaatatgacgtgcaaactcaggaggcggaggagcgcttatactttccagaaatacatgaagaagcacactcagacaaagtatcagcacggcattgctcagaatatacttacgcatttcgtccgtgaacatatagcggggaaccagacacaagtaattgacatagaagataataaaatagcacaaaggaacacaactatgcctcaagaattgggccagattgaagccgcttccacggtccatgaatacaagcggaaagccaaaaacgagcaaccaactgacaatatggatactcatttccaaaaaacgtcgttgtgaaaataactgtttcatacaggcaaagataagaaagattagattagaaataagatttccatgattcttattccataaaataagactggcaggaatcagtgaagcaaaattgatttacaaaaaacattataaacagataatcgggaaaagaccggaacccaactagcattcccataaatcaattctgcttcacccccacaccttttcatccctactcgtaacgcaaagcgtctatcggatccaaatctgcagctttcttcgccggataccatccgaaaaacacaccggtgacggtacataccagaaatgaaagcaacacactccaaggctggataaatacaggccaatgtgctatcgttttaatcataaaactggctccacaaccgataatcactcctatcagcccccccgtgatactgatcaggatagcctctatcagaaactggctcaggatatctactcctcgagccccgaccgacatacgcaaaccaatttcacgagtacgctctgttacagacacatacatgatattcatgataccgataccaccgaccaccaaagatataccggcaatacaagccaacaaggtagtcatcaggtctgttgtagtgttgagcatactactcagctcctgctgggtgcggatggtaaagtcatcatcatccgtttctttcagcttatgttcacgacgcagaatggtcgttatctcatctacagcctcatcggtcatatcttctgtcagagccgaagcaaaaattccacttaggtaagtctgtgccagcaatcgtttcatcaccgtactgtaaggagccagtaccacatcgtcctggtccatgcccatcgagttatacccttttgatttcagcacaccaattacccggaaaggaatttgattacaacgaatcactttccctatcggatccgatccgtcgggaaaaagattatcgacaatggttttaccgataacacaaaccttggctgccgtacggatgtcattctcggtaaacatctccccctgttccacggtgagctgacgtatggtaagataatccatacttacaccactcaccgaagacgggtagttgttggcccccgcaacaagttgtcccgaagaagaaacgttgggactaatgccggagagattagtacactcttcgctcaacttttcataattttccagtttcagtgtctgcatggccgaagggtcttggcggacccctccacgcatctctgctcccggatgaatcataatcatgtttgaccccatctccgagatttgttgctggatgctctttttcgagccctgaccgatggcaagcatagcaatgactgatgccacaccgatgatgatccccaacatggtgaggaaagcgcggagcttgttgttggcaagagcccggagagctattttaaatagattcgttccgttcataatgattcttttttatggttagtcctcatcattcttgggcaaggcagccagcgcggcagcggccgaaagtatctgaggattgatggtatcttccactacatgtccgtcacgcaagcggatattacggctgctatactgggctatttcgggattgtgagtgacaaaaataagtgtacggccttcggcgtgtaacttttggaaaagtaccagaatttcgaaagaggtacgggtatccagattaccggtcgcttcatcagccaaaataacggcaggattattcaccagagcacgggcaatggccacacgctgcatctgtccgccggacatttggttggatttatgttccaaacggtcacctagccccacggctatcagtgattcaatggcacgtttccgtctttcggaagccgatacggacgagttatacatcaagggcaactccacattctctacggcagtcgtcttaggcaacagattatagttctgaaatacaaaacctattttacggttgcgcaacacagcccgctgaggtttgctcatggtacgcacggacacaccatccaacaggtattcaccactggtaggggtatcaagacatcccaaagtattcagcagagtggacttgccggaaccagaagtacccatgatagtgacaaactctccttcataaatggtaaaagagatgccacgcagagcgtggacggtttcatcgcctacctggaagttccgttttatattttgtaattcgattatctttttcatatgatttattctttcaatgtaaacggaagcattaccttttattacttgttctttttcttattgcttcccggagggcctggcatgaacggacttctctcaccttctccggcagacggctcttccattccaggcatagcacctttcactaccgtttctgtcactaccggcgtattttcagtgatgccactcacaatctctgtcttgctgccatcagtaatacctattttcacaggatgggcggtaaaggtattgttatccagtgtccacactttatgactgctctgacaatcgtttatcttacgacctcccactatgtctttgttgggagtaaagcgcaaagccttgttgggaacggtcaacacattatccttggtcaatgtataaatggtagcgttggcggtaagacgcggtttcagtttcaaatagggattatcagctgttatcactacctcataagtaactacaatggtactggtggttgttgaagagctgctgctcgtgctgttcgtacttcccaaacgaacctgtctgactactccttcgaacacatcgtcgggataagcatccacggtaaaggttacacgggctccttcctccaccccggcaatatcggcttcatccacatcggccaccacctgcatcttggtcaagtcggcagcgatggtgaacagtgtcggagtttcgaaaccggatgctacggtctgtccttcttccacatcacggctggtcaccactccatcgataggcgaggtgatggttgcgtatgacaggttacgctcagcctttgccagagccgccttgctttgctccaatgcactttgggcacgttggaaattataaaccgtttcttcatagtccatatcgctgattaattgcttctcgtgcagtttacggttgcggtcatataatttcttttggtaatcgtactcggcctcattgccgtcataagtggcctttgccgactgaagttcactttgcagtgtcactttatccatctcggctatcaattctcctttctttaccacagaattgtaatccacataaatcttgtcaataataccagatacctgcgtacccacttccacctctgtcaccggctctatggtcccggtagcagtaatgaaattgctgacattacctttcgttacggtttccgttgcgaaatcgaccgtactttttccctccggtccgccaagcatccagtaaccgcctgccacgaccactacggctaccgctgtagtaagaatcattttcttcttttccataatataatatgtatagcgttatgattataattttatatcctgacctgcatagaagttcagtagagtccgatccaagatagccatatacttggcctgaatacgttgctgctgtgcactgagcaggttatttttctcggtaagcaactctacggtattcttcattcccaagttgaattgctcgctgaccatctcataactggcctggctacttttcagcttactctcagccgccgcatattgctcttgagcattagtagcgtccaaccacagactttctatattcttatagagttccttttgcttgtttatcaaatcgagtagactactatcatattgcaaacgtgccttctgcacagcacttttgttctggcgattatcaaaaatcggaatgtttatattcaatcctatcatattattccagccatatttcatttgtttgctccagctattatcactggcactgtttgtcatactccccgtagatgcactcagactgatggtagggagatagccggctttagccactgatatgtccaatttggaattctctatgctcaacttgctgctttgaatttccggacgtgatgccaaagcctgctgataaacatcctcctgagcaggtaacggttgcaaaacatgttcatcggcgaattcgggaagaaccaaatccatttcttccgtaccatccagctccaacaactgcttcaactgcaatttatagtcacgcaaggaactttcggagatcaccaactgatatttgtcactgcctacctgtgattccaattgtgccaaatcggcttttgaaatacttcctttatgaaagagttctttgcccctgtcgtatgtagcttggctcacctgtaaggtgttctggttaattttcaccgactcgtcggcataaagtatctggatgaatatttgtgcaatctgctcttgcaaagagttttctgtttcggctacggtaagccctgcaatctgctgactcgtcttcttttgtttgatggcattcaaccgtttgttaccattccacaatgtccattgtgcattcagaccatagtttccattataagtggttttactgtcactactgatgatttccgttccgcttaccgtgttactggtttcctgatacggacggttcgtcacattctgtcctgtactgaacgacagactgggaaatagtgcggctttggcggttttcacgtctacagaactctcttccagtgagattttgtcctgctgcaattggatatttttctccaatgcatagtcaatacagtcgtccagcgtccactttttggcctcttgcgcggaaaccgaagtgaccgcgacccaaatcattacgaaatatactactcgttgtctcatcctttttactatttaatttgtttgtacaaaagtagaggactgtgatttttttagcaataaatatagatttgtggaatatttctatggacaaaaacttgctttttaccgataaagtgtttttctttgtaattattacaactttaagataaatttatgaatgattctttgttgacacgcatctggatattctatcgcgacggctttcgcgagatgaccttgggacgtaccctttggacgattattcttatcaaactattcatcatgttctttattctaaaacttttcttctttccctccttccttggcgggaagacaacggaagagaagcaacagtatgtaggtgaggagttaatagaacgggcaaatccataaacatttaaataaatcagaaagttatgtttgaaaacattgacacttcattaattgactggtcaagagcacagttcgctctaacggccatgtatcactggcttttcgtacctctcactttgggattagctgtgataatggggctcatggagaccttttatgtaacaacaggtaaggaattctggaagaacacagctaaattctggatgaaactgtttggaatcaatttcgccgtaggtgttgccaccggtctgattctggaattcgagttcggaactaactggagtaactattcctggtttgtgggcgatatcttcggagccccactggctatcgaaggaatcctggcattttttatggaagccactttcattgccgtcatgttcttcggctggaacaaagtgagcaagcgtttccatctggcatccacctggctcaccggactgggagcaacgatctccgcttggtggattctggtcgccaatgcctggatgcaataccccgtagggatggctttcaatcccgaaacagtaagaaatgaaatggtggactttgcagctgtcgccctctctcccatggctatcgccaagttcttccacacagtgttaagcagctggatactgggagccgtttttgtagtaggaataagttgctggtatttactgcgcaaccgtcagaaggagttcgctctgagcagtattaaagttgctgccgccgtaggtttgttcgcctctctcgtcactgcatggacgggggatatttcgggagtacaggtagccaaagtgcaacctatgaaaatggctgccgctgaaggattgcatgatggcggaaacggagtacccttcaccattgcaggcgatttgaaaatccccaaaatgctttctatccttgccactcacgacatagacggttatgtaccgggtatcaacaatctgctggaaggtggttatcagatgcccgacggtacaacggctttatcggccgaagagaaaattaaacgcggacagattgccatcgccgccctggatgcattccgcaaagcgcataaggcaggtgacgaagcaagtgccgcagcagctcgcaagacattggacgaaaacgtaaaatattttggttacggatatatcaaggatcctgcccatctggttcctaatgtaggacttactttctggtcattccggatcatggtggggctgggaggttatttcatcctgttctttattatagtactgattgtatcgaaaaaagagaaactggctgatatgcgatggttgcaacgggtggctttgtggactattccactagcctatatcggcagtcaggcaggctgggtggtagccgaagtggggcgccagccatgggctatacaggatatgttgcctataggagcagccatctccaaattgcagacaggttccgtacagcttactttctttatcttccttctattgtttaccgttctgctctttgctgaaataggtatcatgctgaaggccatcaagaaaggaccggagggaattaagaattaaggaataaatgaaacaggtggaaataattcaggctgcgcaataaatgggctacatacaggagattaattccgccatcaagtcattctttttttagttcaagtttctctaattctatttttcaatattcaattctcaatttttaatttagaatattatggactatatatttctacaaaattattggtggttcctagtatcgttactgggtgctttgttggtgttcctactctttgtgcagggtggcaactctttgctgttcacgctgggacgcaatgacgaagaacgtgccttgctggtaaactccacaggacgcaagtgggagtttacttttaccacccttgtcactttcggcggcgccttcttcgcttctttcccgctgttctacagtaccagctttggcggtgcttactggttgtggatgattattcttttcagtttcgtattgcaagctgtttcatacgagttccagtccaagctgggcaatctgctgggcaaacatacttaccaatggtttctggttataaatggtattgtagggcctctattgctgggaggtgcggtagccacattctttaccggctccaatttcctggttaataaaggaaacatgggtaatgagctgatgcctgtcatcagcagttgggcaaacggatggcacggactggatgcgctgaccaatccttggaatctggtcttgggatttgccgtattcttcctggcccgccttttgggcaatctttattttatcaataacatccgggataaagacttaatcccccgctgccgccgtcagcttataacagatgctattcctttccttattctatttctggcatttgttatccgtactttattggctgatggtttcgctgtaaatcccgagacaaaagaagtttatatggaaccttacaagtatttcatcaatctgatggatatgcctctattgctggtattgttcctatcaggcgttgtcggggtactttggggtatcggaagggctgtcttcagcaagactgcgaccaatggtatctggtttaccggaataggagttgtattgactgtattagctttattgctttgtgcgggatataataatacggcttattacccgtccacagccgatctacaaagttcgctgaccttggcaaacagttgctccagcgaatttaccctgcgcaccatggcatacgtttccattctggtacctttcgttctggcctatattatttatgcttggcgtgccatagaccgcaagcccattacagcaaaggaactggaacaagacggacacgcttattaaagagtcttaatggattatagtgaaggcatcctgttttgcaaatagctgtaaacaggatgcctttctatgttaaataacattgtttcaacctataaaatgaagagaatatcttgcaaatttccgaaatatccgtacctttgcattgtgtttttcatagtattagatttaaggttaacaaaggttggagcaaggcgttgctcctttttttatatctataggagacatagcatccatagttgattcatttcccatctagaaagttattttcgtttaaactcttcatctaaaagaaatattatgatacaagtgatgcatacagttgcggattacgtgcatgatgccaaatataagatgccggataaaccccttccttgtttttatcaaggatttctttcaaaatactgcatttgttctcgcccgtcactagaaaacaggtatgccgggcttctatcaagggacgtcccgtcatgcatatacgcactgttttattataaggattgacggacacctcatacggttccccggcggtaagaagttcctgatggtcggggaaaatggatgatgtatgcccgtcctctcctatccctaataatacaaaatcaaaaacaggcacaccgtccacggtcggaacggtggtcttgactatggaagaatactgtttggcttcttcttcgggagcgtcctcacccacaatacggtagcaatgactggcaggaatacctaccttactaaacaacagacgataggccaagccaaagttgctctgatcatcgccaggtggcacacaacgctcgtctacccaatagaaataaatacgggaccaaggggtatatgcggcatattcacgctcccaaacctcaaaaagtgtggcaggagtagtccctccggaaagagcaatggtaaaaggccgttcaagctctttatccatcgcttccaatatatgagttatcaaggtttgcgacgcttgtacaggcgacgcataaaagttatggtcaatcatcttattcactatttattacttagagtttgctgttttaaatttactatccacagatgacgacttacaatttacagtataaattggaatgtgtcagattcttgcacgggtttgtccattcggaatgactgcggttgatcaatacatccgcttctttcggtccccatgttcctgcaggatacccataaagaggagtttcgggatgcttcttccaataatccagaatcttatcaaagtaagtccagctctcgtccacagcatcggaacgggtaaaaagtgtaggatcacccaccagactgtcttccaacaggcgtacatacgcatcccccgtttcctgatcgtgctggtcatagctgaagtccatctccatggttcccatatagaaaccggcaccaggttctttcatggctatgcgctgaagaattccctcgtcgggttgaatacggataatcagttcctcacctttgtaaaagccttccttcatttggaacatctgcataggagcaggtttgaaatgaaccacaatttcggtcaccttggtaggcatctgctttccggtacggatataaaaaggcactccctgccaacgccagttatccacatacagacacatcgccacgtaggtatctgtacgggaatcaggacgaacattcttttcttcacgataaccgatacggtcatcaccagcaatatattgtccgcggataacattatcacggatatacttatcagtcagcggacgaagggattggtagaccttgatcacctcgttacggaaaccattcttgtcaaacttggccggtggttccatggcagtaatagcaagcaactgcatcaaatggttctgtaccatatcgcgcagagctcccgccccgtcataatatcctccgcgagtacctatacccatattttccaccgcagtgatttctacataatctatatagttacggttccatatcggttcgtaaatagtacttccaaaacgggtcaccataatattctgcaccgtttccttgcccaaaaaatgatcgatgcggtagatatcctcttctttaaaataagcggcatagattttatttagtttctgagcggaagccaggtcgtatccgaaaggcttctcgacaatgatacgctttaatccaggctttttcaacaagcccgcatcatgcagacatttcggaatcaattcataaagcaagggcggagttgccagatagaacaaatagttcccattattctcatattgaggcgaaagctccttcaaacggtcattcaacagaaaataagtggtttcgtcagctgggtccatggactggtaatgaacagtagagagaaaatcgtccaatgtttccatttcctctttagtaagaaaaccgaattttatcagttcttctttcagataggcacgataggtctcgtccgtgtatgcagtacgggcacagccgataatggcaaaatgctcggggaagcgtttcccgttatgtatctttatcaaggcaggcatcagtttgcgccgggttaaatcaccggatgcaccgaagatgaccaaaaataaactatgtggtaaactcatgattctttcttttaaaaatgaatgtataatgctttgtgttgcgacatatcaatagttgtcttcccaatgttcgtggaaaaattccccccgtggactgtccacacgctcgaaagtatgagctccgaaataatcacgcatcgcttgaatcatattggctggggaatggttggtggtcagacctaaaaaataattcaacgctgcggaaagtacaggtacgggcaacccttctctcaacatgacaccgatgtatttcttccacgcgggcagggcttccattacttcccgtccgaaatgctcgtccagcaacagatgcgacaatcccggtgcacggtgataggcctcggcaatgtcgttcagaaaagcagaacgaataatgcatccggcgcgccacaacagcgcgatagtggaaagattcaacttccagccatattgctcactggcagtgcacatcagagcaaacccttgcgcatagcctatcagacgagccacatataaggtactttccaatccgatcaccgtatcctgataattatataccggatgattctccacatgcatataatgtttggacatcagcacgcgcaagttcttctctgccgacagattacgggcaaaaaccgcctcggcaatcacgtccagtggtgtatttagttgtagggagttaatgacactccagcgacccgttcctttttgtcctgcagcatccagaatgttatcgagcaaataatcgcctccttcttctttatgacgcagaatggccgaagtaatctctatcaggtaactatgcagacgtcctttgtcccattgttcaaaaatatccgccatctgttcattcttcaacgccagcaggtgcttcatggcgaaataagtttcagcaatcagctgcatatccccatattctatgccattatgcaccatttttacatagtggcctgcgccaccgggacctacccactcacaacacggagtaccatcctcagcttttgccgcaatacttttcagcatcggctgaatgactggccatgcctcttgcgcaccaccgggcatgatggacgctccatgcaaagcaccctcctcacctcctgaaatgccgcaacctacaaagtacattcctttatcataaagttcctttacacgacgttccgtatcttcataataagagttgcctccgtcaatgaggatatcacccttttccatcaaaggaaacagcttgcccgtcagttcatcgacagcgggacccgcctgtaccatcaaaaggatgacacgcggagttttcagtgcttcgacaaaatctgtcagttcattactgcctatgatgccttttcctttggcgcggttggctataaagtgttccactacattttcttcttttccaggaacggtacggttccatactacaaccttccatcccttgttggcaagattcagagcaaggttctgccccatcacacctaatccgattaatcctatatctgccttttccataaattattctttttatatttaacaatttgataggttatttgttcaataattctatctttgcaatttgaataataacacattatcatgaagaggttaaaaatcggcttattagcccgaattatcatcgccatcacattgggtataggattcggaaacgttcttcccggcgaattggtcagagtatttgtgactttcaacggaatcttcagcgaatttttgggtttcatcattccgctgattattctcgggctggtcactcctgccattgccgatatcggtaaggaggcaggaaagatgctggtgataacgacattggtagcatacagcgccacgttgttctccggtttcctgtcttatttcaccggagtgacttttttcccttccatgattactccgggagcaccgatagaacaaatcagcgaggcacatgatatttctccattcttcactgtagccatccccccggtgatgaatgtgatgacttccttgattttagccttcacactaggtctgggcatcgcacatctggatagtacagcgctgaaaaacgtatgtaacgatttcaaagaaatcatagtcaaaaccatccagacggtgattctgcccctactgcctatctatatattcggtatattcctgaatatgacccattccggacaggtatataacattctgatggtatttatcaagatcatcggagtcattttcctgcttcacatcttcctattggtttttcaatataccattgcagcgctgtttgtacatcggaatccgttcaaactactgggaaagatgatgcctgcctatttcacagcattgggcacacagtcatcggcagccaccattccggtgactttgcgacagactgtcaagaatggggtcacggaggatatagccggatttgtcattccgctatgtgccacaattcatctgtcgggaagcacgttgaagattgttgcttgcgcactggcactgatgattatgcaaggaatgccctttgatttccccatgtttgcaggattcatctttatgctgggaatcacgatggtagctgcaccgggagtaccgggaggagccatcatggctgcattggggatcctgtcttccatgctgggattcggagaaagtgaacaggctttgatgatagcactttacattgccatggatagtttcggtactgcttgtaatgtgacgggcgatggggctatcgcattgattattgataagtttttcggaaagaaaaatctccggtccatacaataaacaggaaaaatattcccgaatcagataaagtcaggaaactctgtaacccattcatgaaaagttgccaggctgatttatgacgtgtatgatagaaaaggtaacggctttaattctgataaaagaaagacattttcatgataaatagcaggcaggcaacaagttgcctgccgattcttcataacaaacaaaaaaggaaagcatgagctagaatacaggcatctgccaaatgaatcccactgacacacgatgggtactgaaattatcctcacccaacgcctttgcacgatcggtatatttataggaacgccccacgtatgccaggaagaagtgcagattgctctccatcggataaaattctatacctcctgcatatccccatgccgtgcgatatttccctttttccacttcatcacttgccttataaacggaagcagtttcatacattccttttgcaaacaagttccactttggggcaaaacgataattcacatgcaacacataggacatatattcggcattaaaagcattgtgtgcctgattatcagttcctacgatgttagttataatccctttacggtctactccttcacgagaatacatccagtcaaaataggcatgccatttagggctgaaattaaattcattacccaaagcgtaataatacatcttttcgcccttcgtttcgttcataacagaggcagaccaacgggttttgaaaacatccaggaaatttccgttccagttcaaggtataaactaacggcagtttggtacgttccaaatccccatacatctcctcggacggtccgttccgactgttcaatacctgaaattgtatctgctgataaggattatagttgtatgccacattcaaaccggtcatgaagttactcatgtgctctatcatgtcactatattcgtaaatatcaatcggattcaaatcaaattctataccaccatacgagacacattgctttccggcaaaaaatgagaacttatttaatttgatgcctactcctgcccaatctatgctggtaggtacattatctatattgccggaaccatcgttaccccgattcagacgctgacggtaacggtaactcaaccaatcattgatatctcccttcatttcgatacggagctgcttcatttcgaatgcgccctgatcaaatccggagtcgttccatttcatattgaaatcaccgtgcatattaagatagagattgaacttgtccgttttcttcttgataccggtgacttcttcaaacagacttttgtcaccggccatgaaatcacttccggaagattgggcatataaagggtaagtgcctgagacagcaagggctgtcaggcatactaacattattcttttcataagtcaaagttttaggttataatgtattctctttttcttttatgcgcgcaaaagaaaaagagataaaaagaaaaagtgccggatggactagtatacgttgaagtattcctgaatcttcttccagtcttttgttttagttaatgccaacatcaacaacacacgcgctttctgaggattcaactcttgtgaagccacgaattgatatttattatcatccacctcggcatccaatgtggtcggtccggtaggaacacggctggaacgcactaccaaaataccttgctgacgggccttttccaacatcggaaacaaattctgatgaatgttgccattccccacaccggcatgaataataccttggtaaccattattcaggaaagggatcataacatcagcctctacattggaataactgtaaacgatacctactttcggcagcttgtcaaggtgggccacatcaaaatcggaaccggtggtatggcgtttcaaagattccatattataaaaaaccttaccattcaatacatatcccaacgcaccggagttaggagactggaaagtttgtacatccactgtattggtcttcatggctccgtgggctcccaaaatcaaaccgttcatggcaattacgacacctttaccccgtgattccctggcggcggcagtaactactgcattatacaagttcaacggtccgtccgcactcatggccgtagaggggcgcatggctcctaccaatacaacaggcttgtcactcttcacagtcaagttcaggaaaaaggcggtttcttccatcgtgtcagtcccgtgagtaatcacgataccgtccacatctccacggctgaaaagctcgttgatacgcttggccaacgtcagccatacggcatcattcatgtcctgagaaccgatttttacaatctgttccccggtcacattggctattttgttcacttcgggaaccgcttccagcaatgtgctgatagccacctgcccggcagtataatttgttttagtagccgaagcgcctgttccggcaatagtcccccctgtagccaatatatggatattaggcttttgggcgacagcagccaatgtggtacataccagcattgccgccataaggctgagttttcttaatccgttcataatcttttcaagtttaggttttattactataataattatttggaaattttgttcacacaaagaagaagatgtgccgatgatatatatgttatacatcgaatcattataaatgttacaggcagaagatcactcatcttcaagtccgaatacacctaccccctttcctttctagaacacctgtaccagcagcagacctaccacaatagaaacaatggtggccaccatcccaggcatcatgaacgaatgattcagaatccattttccaatgcctgttgttcctgtacggtcaaaatttatagctgccactactgtaggataattaggaataaagaaatatccgttgacagcagggaacaaagcaatcaacatcatcggagaaatacccagtgctattcctaacggcacaatggcacgcaccgtagcagcctggctataaagcaaaatggacatgacaaacaatgccagaccgaacaaccagggcatttggcgcacaatcccctcaatagagcctgtcagttccgtaatgtttccattaatgaaggtatctcccatccatgcaataccaaatatagcgattaccgcctgcatcccggcaggaaacacactgccttgtgtagctttaattccatccgtacgtgaaatgaaaagaataacagccgccgcacacaacatcaaaatctcaataatagccggcatatccaaagccgtaccattgaacataggacgcatggcaggaatagaaccgaacaacactatcaacagcgtggcggcaataaaaattatcaccgagatacgggcatgaaacatattcttcacatcgttcagctccacatgttttgtatcaatcatcccggcttccaagcggcgcaagtattcgggatcttccaacaactctttacccaccttctttgaaaggaaagctcccaccagcacaccgattaacgtagcgggaatagtaatcttcagaatatcaaacagagtgatgtcaaatcctgtcagcaatcccagcaacgctacggtagcggcagagatagggctggcggtaatagcctgttgcgaggcgataacggcaatgcctaaaggacgctcaggacgaattttagtttccgtagccacctcggctatgacaggaagcacagagtaggctacatgccccgtacctgcgacaaaagtaaacagataagtaaccaacggactcaggatagtcacttgtgaagggttacgacgcaacaaccgttctgctaatttcaccatatagtccagtccgccggcagcctgcatacaagaggcggcagagataacggcgacaatcatcaacatcacatcaatagggggagcggtaggttgaagtccgaaaacaaaggtcaatatggcaaggcccacacctcccatcactcccagtccgatacctcccagacgggcacctacaataatagcgacaagtacaaatagcagttgtaataacatgttttttatccgtttataaatatacaattttaattctgagaacaaagatagaccatttctgttctacaaaccttaaaatttctaagaatttttccttttttcactactttctccctaaaacattcaataaaagttagttgttttgtataatgaacaattcgtcaatgtgctaatcggctgtattatgtcccacatagttattggtacattagcaaatagacaaattattaaattattacatatgaacagaatttgcaatctttttggaataaagtatcccatcatacagggaggaatggtatggtgtagcggttggcgactagcctccgcagtaagtaacgccggaggactgggactgataggagcaggctccatgcatcccgagaccttacgcgaacacatacagaaatgcaaagcggcgacagacaaacctttcggagtaaacattccgctgatgtatcccgaaatagacatccttatcaatatggtaatagaagagggtgtgaaaatcgtcttcacctctgccggaaatccaaagacctggacagaacacctgcatgagcatggaatcattgtggcccatgtagtggcaagcaccaagtttgccgccaaatgtgaagaagcaggtgtagacgccatcgtagccgaaggattcgaagcaggaggacataacggacgggaagaaacgaccaccctatgtcttattccagccgtcagacagatcaccaccgtgccgttgatagctgccggaggtatcggatcgggagaaagcatactggctgctatggcattgggggccgacggggtacaaataggcacgcgctttgcattaaccgaagagagttctgctcatttcacattcaaagaccggtgtctgcgactgaatgaaggagatacccaactgacattgaaacagctctctcccgtccggttggtcaagaatgatttcttcaaacaagtagaagaagcggaaagccgtggcgcaacaacggatgaactacgcactttgttaggaaaaggacgtgccaaaaagggaatctttgaaggagatttattcgaaggtgaactggaaataggacaagtcgcatcatgcatacataaattacagacggtagacgaagtgatgaaagaactggtggaagatttcaatgccgcattaaacagggtcaatgagctgaaaagatttatctgataaggagaacgatgaaacgattaataaaccggagagtgaatcaaaaccaaaatgaacattctaaaggttacagattgtaaccgacaaatacagaaaagccgtatcattactcaaaagtgatacggccttcttattgtcaatgaagaatgtcaagtttcagatgaaaaattcttttctataaagttgagttttataaaattaagttattctacttacaccttctcttattaagcagattagcactcaggaatcccaccaaaaatatcagcaacgtcccgaacacgatagccagattggcatgtacaaagggggatatcacaatccaacaaaccagaattactccacaaacgactcccagtaccgcatcaaaattacgtgccttcctcgaaatataccccaatagaaacagtcccaacatgcctccgctgaaaatagacgccaacgcccaccaggcatccagcgcactttgcacactcataaaggcaaaagccaccagaatccctgccactcccactcctacactggagagtttcagcaccaacatccgctccctgtttccggcatgtttgcggaaccgctgataataatccgtcagaatgatggtagacgaactagtgacactggtcgcaatggtactcatacctgcggcaaagatagaagcaatcagcaggcctgtcaaccccaccggcaactcattgactataaaaaacggaaagacataatccgcccccaccccgtcgggcaagatccccggatgcactttatagaacgcatacagcccggttcctatcataaagaaaacggccgaaacgggaataaacaaatatcctccgaacaaggccgaaaatttagcctccttctcattcttcgccgtatgataacgttgcacataactctggtctataccatagttctgcaaattagtaaatataccataaatcagacacacccaaaaagtggactcacttaaactgcttccaaagcttcccaagctgaatttaccatcttccatggcgatggagaaagtctgcaccggacctccgggcatatcaaaaagcaaaataaacatacataccaacgcacctccgatcagaataattccctgtatggcctctgtccaaatgacagccttcatgccacccaacatggaataaagcacaatagccacactggttacaacaataatggtctggatatgccatcccaacaatacattcatgggcaacgccaacaaatacaggatagaccctgtacgtgctatctgggtgagcagatagcaggacgaagcatatatacgtgcccaaggaccgaaacggttttccaaaaagctataagccgatatgctgtcctgactccggtaaaaaggcacaaagtaacgagccgcaaaataagaggcgataggaatagaaagactgaatacaaatgcattccaatctcccgaaaaggcctttcccggatatcccagataactgatactgctgacatacgtggcgaaaatggacatccccaccacccagccgggcaaacttcttccggcagaagtgaactcctcggaggtacctttcttcttaaagaaagaacaaccgaaggccacgactccgccggtaaacaacaaaaagacgattatatcaatgatatgcatacagaccgagcatttaaggtttcaattccggacaaaaagggagtgcctccaacgccttgcgtatcttctcgcgttccggaacattgaagcgatggaaaggagccgcaacaaaatcatcacaaacacccaataaagacaacgcgcatttcaatcctttcaaataactggagccatgctgccccacggtataaatactgctactgatttgcatcaccaagggttgcagccgacttacggtttccatgtcacgcgctaccgcagcatgataaagatctacatataattccgggaacatattggcacctccgttgatccccccatgtccacccagcaacacacactctgccgtaatttcctccggtcccaccaacatggcgaaatcctgtctgtccttcatggcatacatcacggactggaaataaacggcattagccgaactatccttgaatcccaccacctgaggattacgggcaatgcgttgaatagtagccggagcaaaattcactttcgtgtgcgacggcatattgtacaagaagataggtaacggcaactgaggaatcaggtcctcataaaattcggccagttcaggctgtcccggagcaaagtagtaagggggagcggaaactacggctgaagcaccacactcggcccctacatgtgccagatgaatactttctacaattgaagtatcggaaatacaaaccagaaccggaagtcttccggcattgatacggcaagtttcctttatcatttcatggcgaagccggtaactgatactctgcgcttctccggtggtacccagtataaataatccgtgcactcctccttttatcaatcgttctatcaacctttccaaaccatcaatatccagtttgtcattatccagtaacggagtcactaaaggaggaataatgcctgtcataggcttttttaatgtgttttccatgattcgttttcttttaaaaatttcaatgctatatttatgaaacgaacagtaggattatttgtactcagcccaacatcccagcttgtccggaaagcgacagggcactatcgtttaacctgtcgtcttccgtctgcccggaacgtacctttagaaaaagaacttttaattccgcttcaagaaaagaaagttagttatacatgcgggcaactcttcctgataatgtgtcaccataatcatggtcttgtccttacgacgacagaaagtttctatcacatctttcaccaaccggcggttgtacaagtccaacccatgcaaaggctcgtccaaaataagcaactcaggatccttcacaaaagcacgggccaacaacaccagacgctgctcgccactggacaactgcaagaaattccggtctttcaaatctgcaataccaaaaatatccatccaccattcacaagccgccatctgctcgggacgcggacgtttgtacaaccccacagaatcatgtagtccgcttgccacaatatctatggcaggaaggttcttcagataagcgcgatgcatctcaggactgacatatcctatatgcttctttatctcccaaatactttctccggaaccgcgttttctgccgaacaaggtaatatcacaagcatagctctgcggattatccgcacagaccaaactcaacaacgtagactttcctgaaccgttctctccactcaaagcccatttctcgccacatttcactgtccagtccaaatctttcaaaatggtacgctcgccataacggatgcttaccttgttcaaatcgactacgtgctcggtgtgatacaaatcaccgccgtaaggcaaattcagaatccgtgcctccttttcttcggaaagtatccgttccggtatcggcttacggaccgccaaatattcctgcaaagttatctttttaccacacaccctgtcttccacaggaataacatgagtaataaaagcaggaatatcatcggacttagacaagataaggattacctgcaaatgggttactttagtcagttcgcccaacaatgtatgaagcaggtctctcgtcttcgcatccagtccgataaagggattatccataatcagtacacgcggattactcagcaaagtctttgtcagttgaaacttacgtaactcaccactggaaagcaaaataatatgtttatccagcatcctctctatgccaaacagttcatacaaagcctttttcagacctgaatcggtcgcttcgggcaacaaatcacgtaccagtggggtttcatccaaatcatgggcattccatcgttgctgataatagtaatttccatcggaatctccatatgaatcacggaaagcaatatactttatattctcgtatgccatcttcgaaggagaaggagagaaatcatacttcacttcgttcatcaacaacggccaccggcctgtaatcgtatctaccaatatactttttcctgccccgtttctccccacaacagctatatgttctccggcggcaagtgtcatattcaccggttccttcatccggtacagcggatggcgggtcacaccattttctatcgcaataatattctgcattacaaatctcttttttatccaacaggatgcaaaggtaacaaaataatataaaaatgagataatatattatcatcttgttacatcaatcatccaccttaattatatatgataccaattatacgacactgaataaccaacaaaatattacctaaactatatgttccataacagaatataggctcaaatttataaagcatcaacaagatatatatttgcactaaattaagacaaaaggaaataataacagaagaaattatagacaaaatggcaacaacaatcacgttcacaaagatgcagggagcaggtaatgactatatatacgtaaacaccctaaagcaccttatgtcctaaaactgcatacggagaacgagctggtagaagaagtaacagtggacatggatcttcccctgcttgccaactccagacaaataaataccccggacggcaaaatgttggcaaaaacaatcacagtagatggaaaagaatacaaaagaacatttgtttgtatgtgaaatccatatttagtggttttcatagatgatataaaagatgtaaatttgccggcaataggtccgaaactggagaatcatccgctttttcccgaacgaaccaatatagaattcgttgaagtattatcacataacaagcacaagccattacaagaaaaacaaatacatacgagatataacaaactcactattatggattaaaaaggtaaaaagcaatgaaaaagagttttagaaaaacaacatttctgtcggccttggcaatagctgttccggcaatgggcatggcgcaggacaaagtggaagccagcgcaggagccgatctcgtaagcggatacatctggcgtggccaggatttaggaggtgtcagtatccaacccacgttgtcagtttcttacaaagggttctcattgtctgcatggggaacagcaggtatcgaaaaagaagatacaaaagagattgacctcacattaggctacgccacaggaggtttcagtatctccgtcacagattactggttcaatggaggaccggggtattttcattacggctcacacaataccaaccataccttcgaggcacaaataggttatgacttcggaccgctggccttgaactggtataccaatttcgccggaaccgacggagtgaataacggaggaaacagagcctattcgtcctatatttcggctaccgtacctttcacactggcagggctggaatggacagcggaaataggagcgactccgtggggcacagacttttacaactattccgaagcccctgtatgcaacggttccaacggtttcaccgtatgcgacatcagcatgggagccgccaaggaaataaaaatcaccgattcattctccgttccagcttttgcaaaagtcaccgtaaacccacgcactgaaggggcttatttcgttttcgggctaagtttttaatcataaagagcataaccagacaaggataacaacaaagtattagttttttagaaggtaaaaagattacattatatacaaaatacaaatacaacaataaaaaaattgaagctattatctgtaagacccaattcgaggacgtaaaagaagcattgctcgaagccaaaatcgaatggctttcctattgcaatgtaaaaggcattggcaaaacatgtcaaggacgcatttgaatgccgtccgcatccgtacagaagaacgcggatatatcgccttgtacaatgcagaacaggagaaataactcattacacggccaaaactactccacaaagtaaaaatcatactataacttaagcggaaaattatggatacaactaataaaaagaggtcgtcagatgtagaacaacctctttttatcaggtaaacacatcataaacaagaaagatgaattacaagcaaggtaccttcacaaatgctgtatccgggaaatgcttctctatataacgacaaatataagtttctgtatctgcttgaatgattttatcctctccttcgggaaacagattgtacatcactgtatgaagctttatccctctccgttctatagcctcaaaactcaataatgtatggttgatacttcccaatcgtcccgaagtaacaaaaactaagggataacccgattcctgaacatagtctatagtcagattatcttctgtcaacggcaccatcagccccccggctccttctactaaaacagcatcatagcgctcactcagcacctccgtggcatgctttattttatcaaaatcaatggcgcggttatctattcgtgaagccaaatggggagaagccggataagaaaatatttcaggtttggtaagtccctgctcatcctcaggcaaatactccatccccatcagacgacgatgcaactcaatatcctccgaataaccttccggatttcctgtctgtatgaatttttgagtaatagtacgacatccttgtttgttccaaagatgtgccagataggccgtggcataacttttaccaatatttgtatcaataccacttacgaaaaatacattctgtttcatgattctttttatttctattgtcttttctttgcaataatataaataggatgataagtcaaagtcaccgaacgaccatcactgaacaaacgggcatacttatcacagaaatcctgcaaatcccttttagtccacgcttgttgcctgacagcagccaccccggtgtgtttcaagtgataaagcacttcgagcggagtaccgaaagtcagacagatacgttcctcatgagccttcacgatctcatagtgtatgcgcagcgcttcttctaattcctctaaagaacgatagtgaagaccgctgccggtaaccgatgcaacttctttcagattatccctgccgaacgtagtaaaagcaaaatatcctttctgcttcaacaaagtattacaacgttcaaaaaacagctcgggagaaacaaaccactgtaatgccgagcatgatacaatcaaatcctgtccttttggaaaaggaagggactcggcatcccctgccagaaaggtagcctgcccgcttcccaacaaatcggtgaaacaagaactcatctcctgacaaatatcattcaacaccagtttttcaggatggagggtttccatcaacctgcgggtaagaaagcccgtcccgctaccaatttccaatatccggccgcacggacggggcaaataatgatttagcatatcactcatgcggtatgctatctgcttttgtgccaccgcctcacggttataactctctacagcgcgggaaaagcgacgggttatcaattgcttattaatcatacgtttttgttttaaataacagacgggcatagcaaatctctcattatttcttctgaataatgaggaatatcatactctgccacttccgtccctgtccatgcatttctttggttgaccgccgtaaaaatcaaatcattcttgcctataacagcccgttcccatgcaaaactgggaacagcgcaagattttacctgttctccaatcctccgaagctcttcttgcagttcctctaccgcacgttgcggacgtttcgacaagaatgtttccagattctcctttttcaaacacatcctgcggataaacttttccagcgcaacctcattcaagccttccagtgttccttcaaaaacttgctgcggaatacctttcaaatcatcgacaggagttaccgtgccattcaaagcaacacgctcacaaataggcaagtccatatcctgcaataccatagacgcggcccatactcccatagaccaggctatcaggcgaatctcctgataaccctgcaacaacgtgaaatcaaaatccagcgaacgataatcataacaaaccaacagatcgctattttcggggcaataatccatgaaaggacattcatccattccccaaccggcaaaaaaaagtgtcaatcggggaagatgcttttgttgtataaaataatgtttcatatcaattctatcagactttttatttcttcttcagtaatatccgctgtcaacgaaaaacggatacgcgatgttccttcgggcacagtgggaggacgcaccggcaacgcataaaaacctttacgctgcaagaaatcggcctttaacaccgtatcaccgctatcgcctatcgtcattggcagaatatggctggtagaaggacaagcgtagcctttctttaccaacgcgtctttcaaaagagaggatattctcttcaacctttccctccggaagctgaaactgtccaaatgctccaggataaagaatgtccatagcaagttgacaggaggaagagccgttgtaaatatgaatgtacgcattttattgatcaaataatcacggatggtcttcgaacaaacaatatagcctcctactgaggccaacgctttaccaaaagttccacataaaaaatcgatgtcagccacacaatcctgttcttccgcacaccccaggccatgcatcccccgcacccctacagcatgcgcttcatccacatacagcaatacattatcatattgttgcttcaaagtgaccaaacggcggagatcggcctcatcaccgtccatactgaaaatactttcggttacaataattattctatcatacccggcatgattggaaaccagcaactgttccaattggtcatatcggttatgccggtaccgaatacacttggccgccgataaacgaatgccgtcaataatgctggcatgtaccagtttatcggcaagaatcaatgtacgagcatcgctcactgcaggaagaataccggcattcatgtgataaccactattaaaaaccaacgcgctttccttccgaaacagtcgggcaagcaaatcctctatctgaacatagatattaaaatttcctgtcagcagccgagaggatgaagaggaaggaagaaaagtgtcgggagtaagactttgcaagaattccgtacgtaatggcaggtaagcagccaatcccagataatcgttggatgaaaggttaagcatcacttttccattcacctccacctctcttcccaaatggcggataacaggcaacttacgaagattacttttattttcaagcagggctaattccctttcccagtctgttaatgaattcattttttctatttttcccaatactatcacttattcttttaattctcctactatttttaccagtgaatgcgtcaatttgctcaattcttccggctgaattataaaaggcggcatgatatacaccagttttccaaaaggacgtacccatactccttcttcgacaaaacgacgttgcatgaaagccatatctaccggtttcttcacttcaataaccccgatagctcccaatacacgcacatcagccacctgcggcaataaagcagcaggagccagctccctcttcaattgtgattcaatagcctttaccttttcctcccaactatatgaaagcaacaattccacggatgctttcgctacggcacaagccaacggatttcccataaaagtagggccgtgcataaagactcccggataaccgccggaaatggtatcagccacctcatcactggcaaggacagcagaaaaagtcatgtatccaccggtcagtgccttacctatgcacatgatatcgggctggacacctgcatgctcccaagcaaacagtttccctgttcttccgaaacctgtcgctatctcatcaaagattaacaacagacgatattgcctgcaaagtttctctacctggcgcaaaaactcaggatgataaaaacgcattccgcccgccccttgtacaataggttccaaaatcaatgcagccatttcttcatgatgctgttccaatatttccttcaagggttctatatcctcttcataccagattccgccaaagcgcgaccgaggagcaggaacaaaataacgcacaggcaatgtagggccaaaaatatgatgcataccggtcaccggatcacaaacggacatggcattccacgtatctccatgatatccggactgaatagttacaaaattatttttcttttccttcccttgcgcataccaatattgcacggccattttcagtgccacttctaccgcaaccgaaccggaatcagcataaaatattttctgcatacggggaggaacaatcttcagcaacaacctgcctaattcgatggccggatcgtgtgtcagtccgccgaacatgacatggctcatacggtctatctgttccttgagcgcttggttcaataccggatgattgtatccatgtaccatgcaccaccacgaagacatcccttctatcaaacatcttccgtcctccaattctatatatactccatccgcccgtcttaccttataagtgggcagcggatgagtagtcgatgtataaggatgccataaatgctccctgtcaaaattttccatatattatttccttattgttataataactttataatgtatcaaagcgaatacccggcctcttctatcaatattttatcttctgatactttggaacctaatgtagtcagcaaatctcccacaatggcagaattaataccgatatacaatgctttctttacagcttccacactcatctgtgaacgccctccggcaaaacgaagaaaggctgtgggattgataaaacggaataaagcgatggttgtcagaatctccgcctctgcaagacgatccattttttccaatggagtgccgggtataggctgtaacaggtttataggaatagactgtacttccaattccctcagtgtaaaagcaaactcaatacgctgttccattgtttcgcccatgccgatgattcctccgctgcatacatccatccccaccctgcgtgctgcctgcaacgtttctattttctgttcttgtgtatgagtagaacatagagatgaaaaataagagggagccgtttccagattacaatgataacgggtgatgcctgccttaaacagccgttccaattccgcttcatccagcaatcctaaagaagcgcataactgaatatgcgaatgcgcacgcatgtactctgttgtctcacatagccggtccatgttacggctacccggtttcctgccgctggtcaccaaagaaaaacgggatactccctgcgcttcgttatacaaagcatggcgcagacattcttccttcccaaccaaatcataaacatccgcttttgttttataatgtgcagactgtgcgcaccatttacaattctcaggacacttaccggatttagcattgataatggaacacatatcgaatttccgagaagccaggacccgtgttatctcatgagccgcatcatacaaatcctgtttctctgcctggcaggacagccaacgggcttcttctacggtaatcttctcaccgcccaacactttgtttcttatttcattcagcatcatatacagttcatattaagacaaaaaaagccgaaaagatgcatggcacatctttccggcaaacaaatatttatttaaataaaaaagacaaatcacgtcagccacctgtggttgaggcagttggatccgaagcatttgcaacatggattcaacaggggccattccttcttcatattcctctccagcatcctctttccgtgcggaagagcaaacagagaatgccgtgcaaacatttgcctgtttacccaacgatacatcggcaatctcctttttcagattaccaatagttacatatttgcccaagctataaaacatagcgtacttcttccggctccaatagcggaaacgtatcgtatgtttattctggcacaattgtttcatgttttttcgtatctgagattggcaaaggtaaataaaatattcaatgcagcaaacttttatatagaaaaacaccgttccgcctcttacaaccttaaaaccagttttccgaaagcacaacggtgaattcttaagtcctttatattatatttctgttattcttctttcttcgaagcagctttcttggcaaccggcttctttgccgtcgctttcttggccgccgccggtttcttggcagcaggttctttctttacggcaggagcctttttgccttcagctttctccagtttagcctgcaatctctccacttccttgttcaaagccaccaattcctcgccctgattcttaatggtagtaagcaacgaatttaattcttcgttatccatatctaccggatacaacgaattgacacgacttataaaatcacccaaaatgttcatatagttggtgaaagcatcatacggagaatcataaataccacgattcaaccaaataccggtattcttagtggtcatgaagcggaaattattacttgcctgcaaataatcccaatcctgcttaatacggcgatcatcgcacaaatgaacacgttctgccacactataaagtttattgaaagcctcacgctgcatcacattgcctaaccacggactgatatcgcgttcctcgtctatccatgacataggataaggaacatccacctgatccacagatttcagtttggtaatgatatcggtcggagtagagaaagtaacccctctttcttttgcgcagacaggcagtgctttcataaattccaaaatattggaagacaatggctgggcgatacccaaagcagaaagttccatgaaaatattgataacctgctcctcctccggcaaagctgcaatccaatctatatatttgtcggcaaacaacggatattcattccattcggaattagagaaacgcaggctgatgtcatcagacaatttgaaatcgcgaagcaataacttcaagttcggattcatggcacaatgatacaggtagtgcgggctcttccaacccaaaatatgtttcgcgccttcagtcaacatacctttaaagcccatatcggctatcgtagcgccaatatcattcgaataaatcaagctggagttacggaataccttcggctccttgccaaatatttgtttaatcttggtacgcatacgttccacttcttcgcggaaacaatcttcattagccaatgaggaaagaccgtgagaataaggttcgcacaagaattcgcaacatccggtctcattcaactgatgcaacaactcgattacaccgggcgcatgcacttccaactgttccagcgccacacccgagatagacaaagccaccttgaaagtatcaccgtgattctttgccatttcaatcaacgcactcagcgcaggaatatacgagcgttcggctatatcactgatgccgcgctcattttcataatcatcataataataatggtcacggcctatatcaaaacagcgatagcgtttcagatggataatttgatgtatttcaaaataaagacatattgttttcatatcctagttattgttttattatttaccatagttttttaacacctgctcatagagggcacggattctcaagccgactttctcccatgtaatgccatccacctctttctttccttcttcctgcagatattggaaaagagaaggattcgtacaaatagaatagatggcatcggccatagcgttgatatcccaataatctgtcttgattactttatccaaaatttcaccgcaacccgattgctttgagatgatagaaggagttccgcactgcatagcctctaaaggagcaataccaaaaggttctgacacggaaggcattacgaatacatcactgtttttatatgcttcataaacctgacgcccacgctggaaccccgggaaatgaaaacggtctgcaatacctcgttccgcagccagattgatcatggcgtccagcatgtctcccgatcctgccattacaaaacggatgttacgggtacgcttcaagaccaatgcggcggcttccacaaaatactcgggtcctttctgcatcgtgatacgccccaggaaagtcaccactttttctttcgagtgatcaggacgaggaatgtccagcaaatcttgcgaaagcggataaacggcattgtgcatggcaaaacatttgcgcgggtcttgatgatattggtgaataacagtctgacgggtcagctcggacacacacataatacagtcggcatgatccatgccattcttttccatagcatatactgtaggattcactttaccgcgcgaacggtcaaaatcagtagcatgcacatggatgcacaaaggtttgccacttaccagcttggcatgcacaccagccggataagtcagccagtcgtgcgcatggataatatcaaattcttgctggcgcgcaaccacaccggcaataatagaaaagttattgatctcatcatgaaggtttcccggatagccgccggcaaactccatacaccccagatcattgacgtgcatatatgagaaatcagaatagatatgatcacggaaagcataatactgttccggagtcgaagtcgaaagacgtgactttaagtaatcataatccacatcacgccacacaatgggcacttggttcatgcctataatgttcagaaacttttcttcgtcgccacaaggtttgggcaaacagaaggttgtttccatatcaccttgcagactcagaccttttgttataccgtaagatgctacagcaagaccaccatatattttgggaggaaattcccatccaaacattaatactttcatacaggtccctcctttcaataattgtatttactcaataaatataatactcgtaatatctctgccacattcatagcgaatgatacagctccacgacctttgaaaggcgggttaccatcaaacagttcaggtatagagccaatacaatgagaagtcatttcgtcttcgtagcctatcagctgacgctccacaaatcctatgccactcatcttataaatacgaaggtaagcttcaaaatagaagccagccagccaaggccatgcggtaccttgatgataagcataatcacgctgcatctgaggacctacatagttcgggttgtaaccgccactcttcgggctgagcgaacggagccctttcggggtaagcagttctttggtcacaatgtccaacacccctttcttctgacgggcatcaagcggagaatagtcgaatgctacagtaaatatcatgttcggacgcacactccagtccatcatattgccatccacataatccagtaaataaccatactcattcaagaaagtatccacgaaagcctttcccgtcttttctgccaatacatttaacgtttcagccaaattattgtttccaccttcgcccaacagttcatttgtaaagcgtaaagcattataccacaaagcattaatttctacgatatagcctgtacgaggaatcacaggacgtccgtttgcggtagaattcatccatgtgatagccttttccgttccgttggcatatagcagaccgtttgaatgcaagaaaaggttcggatgattctcccggcgaaggtattccataatgtcctgcaacaatgtaccatatttctcacggcattggtcacgcgacaccatcttggcatattgctggatacaccacactgcccaaagcaagacatcaggatgctccatttcgtacactttaacatcatcaggctcatcattaataaagtcatgaattgccttgcgggccgtttccatcaccatttcaaacttagccacttcatcaatcgccaatgtcagtcccggcagggaaataaacatatcgcgcgcacggcatttaaaccacggatatcctgccagaatataaaactcatctccctgtttatttaagaactgatgggcagcatttatcagacagtgctggaaattatcacgcggagtacgttcttccacctcctcttcaaaggttctctttaatgtacgggtaccggcctcggaaacacctcctgaaaagacaatgctttcacctttctttatgtccacttcaaaataacccggaacatacaaatcttcattaaaatcatatcctctctcctgctctttgggatactcaattccccgataccaatccggctgatagtggaattcgttcttcttgttcaattgcatatataattcgggatagcccggatacatgcatgtcttgatcccattgtccacctcctgatagtcacggctggcttgtgcgttctcatgagtatactgacggacgctgcggaaagccagaaacggacgcaaacgcaacgtagtggccgaatgtgcctccagcaaagtataacggattaaaattctattttcatgatgaacgaaaagcttttccttcttcagaatcacaccacctacccggtatatagtggtaggaactttctcacactcgaattcccggatatacttgtgtcccctggggctgtaattgtcaccctgatacttatgaagccccaggttaaattcagcgccgtgttgtatcactgtttcatccaacgacgataacaatacatggttttcatcatccagctcaggcaccggaatgacaagcaatccatgatattttctcgtattgcaatcaacaatggttgtacaatggtaagcccctgaacggtttgtgcggagaatttctttcggtaatgattccccgaggttcgtcataagagtcttgtcaaatcgtaagtaactcatagttgttattttaaggttataaatcaaatttccatatcaatttgtgtcacatattatttttgtatgcaacgctcaaaattagtaattaaatggataaagcaaaattaaatagcaaaatatttttcatttttcgctcaaatatccgtagtattgcacagaaatcagcataattatgacaaaatgaaacttgaaattcaaaaaattctattggcttttgctcttccgttattacttcttttcattctgtacaccctgcgtacaatggaaagtgtcatgaattgggattttatcacctggggcatatatcccaaagaaaccaaaggaataatggggattctcacttctccgttgatacacgccgattggggacatttatttgcgaacacttttcctcttctttttttattatggtgtctgctctacttttatcgtgatttgggcattggtatactttttttcatctggatagtcagtggaatacttacatttataataggcaagcctggatggcatataggtgccagcagtataatttattcactcgccttctttctgttcttcagtggcattctccgcaaacacgttcctttagtagccctgtcattgcttgtcacctttctatatggcagcctggtatggaacatgttcccgcagttcgcttcctccaccacttcttgggagggacacttggggggcgcagcggccggaatagccgcaactatattgttcagacacaaaggtcctcaacaaccggaacttttcattgacgaggaagaagaagataacaggagttatccggaagacgaagaagtcattacaaatccggaccaagaaaagaaagaatgactaaaccaatctttccgcctcatgaagtccaaaggaccggaagggatgaaaaaagcaataacccgctaacggaattaaacgaatgctcatatcctccctattgtataagccttttctatcttcagattaaacctttttatacggatatattctatctccatagcctttggagttatctcccaaggctatggagttaactccaaagcttatggagacaactccaaaggcttgcggagataaaacaggcaggaagaaaacccttaaccatacgtcaggaaaggtttaggaatccgaataaaatattttaaggatgaatctgattacaaggccacatactccttacagaaaaaagtctccctacgcccttcttttaaaaagaaaaactataaaaccttgtttcagggaagcacacctttggaacaacaaaaggtccggacttggaaaagcccggacctttattttatatccatcaatacaagatattaatacacctctacctttgcagcagcagccttgcacttgtcacgcaaagcgtccaagtcactgccattaggagcataacaaaccacaactcccatacggcggttcaattttgtataaggtttaccaaaaatacggagataagtatttgtctccttacaaacttcctcttcaccacgataacggggagcttccttgctggcaattggagaaagaatcactgcactggcccctatgcgttcttgtgtaatttcagggataggaagtcctaacaccgcacgcagatgcaactcaaactcatttaaattctgagtacctgccaaagtcaccattccggtatcatgcggacggggagaaagttcggagaaataaactccgttttcatgactcaagaaaaattcaactccccagattcccgcaccggtcaaagccgccgtcactttatcggccatacgctgtgcctccttcaaatgttcgggatcaatgtgcgccggctggaaactttccctataatctccccctttctgtacatgtccgataggcggacagaacaaagttggaccgtttttctgagtgacggtgagcaaagtaatctcactatcgaactgaataaattcctcaatgatcaattctttaatatctccacgactgccttcacatccataatgccatgcctgttccaactcatccgcgctcttgaccaaagactggcctttgccggatgaagacatcaaaggtttcaccacacagggaaaaccaatctcttttgcggcctcctgcaattcttccaaagacttggcatagaaatacttggctgtctttaatcctaattccttagctgccaaatcacgaatggccttgcggttcatcgtgaaattcactgcacgggcactcggcactacttgaataccttcctgttccaaatgatacagacgttcggtacggatagcttcaatttcaggcacaattatatccggcttgtgtttggctaccacagcatccaacgcatcaccgtcaagcatactgaacacttcaaattcatcagccacctgcatggccggagcacctgcataagagtcgcaagcaataacatactgccctttacgttttgccgcaatgacgaattccttacctaattcgccagaacccagcaataaaatcttcttagtcatagtatttatatatgtttgatattccttacaaaaaacggagagttgagaacaagacacctcttgattcccaactttccatctgcaaagatagtgtattttataaactatacgatatcattgaagcaatatttggatcattcagtacaaagaaaacacccactcccaacgcgatgagccacaatacgataaatataattttggttacaatggacatgggttgccaacctccaaaatgacgcatcagcatgtgtatcagtcctataataggaataccgataaccagaatacctgctacggacatagcgacagtcaaccccggagagctacccaccgtagcccaattaaccgcaggcagcacctcataaagcacagccggcaatgcagcaatcagtcccgtagccgccatcagcaatgcaaaaaagacaatcaataatacaaacaatacaggcgcacagcaaatagcaatgaaaacaagcaggaacttgataaggaaccctgccacagacacaatcccctcccctatcttttgcaagatactcctaggacggtctgagcgtacataatcattcactttttcaaatccgtctgttacagtcttgcctatattctccatattaatagcagcccccttcatggcgagtttctcgggagcggtacgcgccataggaataataatccacgctatgatataagccaatatcaccccatgaacaaagaaaccaagaaccaatagaatgatacgtacccaagtaacatcccatcccatataagcagccagtccggaagccactccacctagtaccttattgtccggatcacgaaacaagcggcgcatagtggttcctttttgtttttccgaacccgatgcttctccactttcttcatcggaaagatcttcgggtttacccatccgggctatgatttcttccacatcttcaatggtaataacctgtttaccttcattcaaacggtcggtaaacagctcagagatacgtaattctatatcatgtacaatttcttccgctccctcctcacgacagaagtgaatacgcaggttagttaaatagttatccaacaaatggtaagcgtcttcgtctatataataaacggtacctcctaaatttatggttaaagtctttttcattgtatcctgtttttaattgttttttaaatgattcactgtattcgccagctcctcccaggcagcctccagtccgctaaggaatgtttcaccctgaggagtgagactataatatttacgaggtggtccctgagtggactctacccattcgtatgagagcaggtcatcgtttttcagccgggtaagcagcggataaagcgtcccttctactacaatgagccgggcttctttcaatttttgaatgatatccgaagcatatgacggctctttgtgcaacaacaataaaatgcagtattccagcattcctttgcgcatctgagatcgtacattgtctacattcataatctataatactttgtttggcacaaatatatgtattatacaagtaccttgtattacatagttctactattttgcataaattaatatttaaacaagaaaaagaaaggaatcccctttttttcttgcaaaaagtttatctttgcctctcgttataacactaaaaagatataaagatcatgtttaccataaaaaaggcaacgaccaatgatattcagttgattaacgagatggctcagatcgtgtttccggctacctaccgggaaattctttcaaaagaacaattggattacatgatggactggatgtactctccgaaaaacctgcgtaaacaaatggaagaggaagggcacatctattacatagcttacaaagatggagaagctgccggatatgtttccatacagcccgaaggagaacatttatttcatctgcagaaaatctatgtacttcccctttttcaaggttgccggttgggcaaagcactatttgagcaggccgtcaaagcaattaaagaaatccatcccggaccttgcgaaatgcatttgaatgtaaaccgtaacaataaggctttacaattctaccaacatttgggaatggaaaaagttgcagaaggagatttccatataggcaacggatattatatgaacgattatatcatgggactgaaaatctaaccctatcttacaaaaacaaaatggacgaatatcgtatcaatggattgaccataaaagaaaatttgctgcaactggcagaaaatggaaataaaaagtttaccgaatcgctgcatccgggaatagaaaatgtattgggtatccgcatccctgccctaaggcggttaggagcacaaattgccaaagatgactgggagagttatctacagactgcggatacttattatatggaggaacgtatgctacaaggtatggtaataagtaatctgaaaatgaaagacacgcaagcatatctttcactggttgcccggtttattgccatcatcaacagttggtctgtttgtgacacctttgacttttacggcaaacaacggtttgtggacaagaacaagaaaagggtctggctatttttggaagaccggatgaaatccgacaaagaatatgaaatacgtttcggagtagtaatggcaatggctcattatattgacgaagagtatatagacaacgtattgcaatggatggaccggatcagtcacgaaggatattatgtgaagatggctgtagcatgggctttatccgtatgttatgtcaagtttcctcaaaaaacgatgaactatctgaaggaaaatcatttagatgactttacttacaataaggcactacaaaaaatcatagaatcttatcgggtaagcacggaggacaaagaaatcatccgcagcatgaaaagaaaaaacaaataatgtccatttaccgcaaagaggctttgaatccttccgaaagaaattcaccattcatattcggaaagattcaaaccgctccagcagctattaataatcgggaaaagttattcctcccaaaccaaataagctgaaaccagccaatgattcaatttattgccatctacctgttgtgcctcagggatacttaccttaaaagaatgtttaccggccgacaagtcaccaataacagcctcctcaggcatcacatcgctacccggacaccaattggaacgggacaaatccgaagaagccaaaggttcttcaatctcttttgtcgtataccccttatcacctatatatgcggcaactcgtggtatcagccatactcccgtggccggattaaaacggcggaaagaagcacagtcatcacgccaaggaatgaaattcaacacctccttgccatcaacagacacgatgttccgtttctccacaaactcatctccgccactatgtcctccgtgacctgttacaatatacttcaaacgaacattcttggcagctttcggcatatcaaaatccatcaccacatctttgcgtgagaaaatatccggataagtctgtccgatataatacaccgtattcatcaaaggcttcacacggcgctccggcatcacgtcgcaagtgatcttactctccttcacatccaattccatactggccacatacccctcggcagtccatgtatcaatataaattcccacgtatgcctctctctccaatgccggataaagatcggtaatatcctgcacccaagtcacactcttttcccatttcgggatatatacaggacgcctcttgctgctcaaagaatcattatccgaactataataccccacaccgaacggggtcataaaacgcatcagttcaagggtaggcacataatcctgacccggaacaataccaatcattttttcatatttggtactgtctaccgcaggaaacgccctcttgccttcggctatattcatcagattaatcaccgattctttgggaagcacaaaacaagagccagatttatcccaacggtcaccattggaagctacagttactttcagggtaacatccacatcccttttataatcgggcaaggttattttctttaaaatgatacgcccgtttaccagacggatcactccgtcagcattggcaggagtataattagggaaagaatcgggacgaaaacaaacaggggttttgtcgaatacttgaatatgagtatttcccaatgccggtaattctttgtgatttgcagcatcggccggcatcataaaagttgccgccacagccagtggggcaataaaggtcagcaggttcattctttttaattataggttagtaatcaagggtatataaattaatttcacaaaaaactacacgggcctacacaaatcgtccgatctgtataaatccatgtagtctataataaaaaaaggaattattgatgctgttcacgcaacaaatcattcacagtcttcaccgggttaaaggtactcaacggcacttcaacaaaaacagtgttccagtcactcattgcgccgttccacaagcccggaagctccaatgctttcagttctctaccgttctttgatttataagagataaaacctgtagccttatccacatacttcaccaagtcgaatttgtttcctttataatcgcgtaccgcacacaccaaatccaccggattaaagtgagtacccttctcgaacatctctttcttgaccggatcattcatgtcaatctgagaactttccaaaatttgcaatgaaacagtaccatccgcattataagccaggaacgggccgcctcccggttcacccacattcttcaccataccgcatacacgcatcggacggttcaacttcttacgcagataaataaccagatcggcatcttccagatccttgatatccagtttgcggcaacataaagtctgctgtaagaaacgaatgatctcttccagctgcgcatgtgtatatttaccgccatccagtaattccaaatattcaaatacctgcttctgcagagtaaccagtacccccgcaatcagctttttatacgtaacagtatcctctttcaagcgatcgggaaccacattatctatattcttgataaagataacatcggcatccaaatcattcaggttctcaatcagcgcaccgtgcccccccggacggaacaacagcttgcctttatcgcggaaaggtttgttctccatatcggcagcaaccgtatccgtactcggcttctgttcagaaaacgacacatcatattccaccccgtatttctttgcataaacggcaaccttctcttccaccagctttgtgaacaactcacgatgttccgtagaaacggtgaaatgcacattcacttttccggtcttgcctgccgcatacaacgcaccctccaccaaatgttcttccagcggtgtacgcacaccatccgcataccgatggaatttcaacaaccccttcggtaatgccccatagttcaagccggcagcttccagcagattggctactataggtttatactccttcccggccatcaaagcatcaatatcctttcctgtattatccatacaagccgcattcaagtcattgtagaatgcgaagctatgaatatggtcgaaaaatttcttttcgaaatcagtcttcggaatattgtaatcagcccccaggaattcgaacaaattcttgaacatgcggctggcagcaccagaggcgggtacaaacttcacgatggttttctccccttccttatatgtatcccatgcttccaaataatttttcatttcattttcggcgggagccatgattcccttttcaacagaagcggctgcatccaacttcaaaaatgggaaacccttttcaaagcaagccagttgttctgcaatctgctgctcggaaattccttttttcactaataagtctttgtcttcaggtgttaacataagtacatgattttatatggtttaaataaattgttaccttattctttcactattaattgcccaaaaatacaaaaaaatgcgagaacactacctaataaataaagaaaaaaactacctttaccctcgaaaagatttcacgtgttatggaagaaaaagcatttttcacagccaaagagcgtgagcaactgttcgccctctataaacgattgctgcaattatccggcgacaccttgcagaagggtgattgccataagttaaaaatacacctcataaaagcagttgccgaaggtaacctgccacgaaattgtttcggaatgaatcctatcatcaaagatatgcagaccgctgtcatcgtggccgaggaaattgggatgaaacgggcttccatcctggggatcatgctgcacgaatcggtaaagaaccatttatgcaccttagcatctgtacaacaggaatatggagaggatgtagcggggatcatacgcggtcttgtgaaaatcaatgagctatactccaaaagccctaccatagaatcggaaaatttccgcaacctgctgctctcctttgccgaagacatgcgtgttattctgatcatcattgcagaccgcgtgaacctgatgagacagataaaggagactcccaatatagaagcacgcacccaagtagccaacgaagctgcctatctgtacgcaccgctggcacacaagctggggctatacaaactgaaatcggagctggaagacctttccttgaaatatactgaacacgacgtatattatcatataaaggacaaactgaacgaaacgaaagcctcccgtgacaaatacatagccgcctttatcgaaccgatacagcataagctggaagaagcaggattgaagttccacatgaaagggcgtaccaagtccatccattccatctatcagaaaatgaagaaacagaaatgtcccttcgaaggagtgtatgacttgtttgccatccgaatcattctggactctcccgtcgacaaggaaaaacaagaatgctggcaggtatattccattgtgaccgatatgtatatgcccaatcccaaacgtctgcgcgactggctctccgtacccaaaagtaacggatacgaatccttgcataccactgtaatggggcctgaaggcaaatgggtggaagtacagatacgcaccgaacgcatggacgagatagcggaacgtggtctggcagcccactggcgttacaaaggcgtaaaaggagaaagcggtctggatgaatggctgacctccatccgggaaacactggagaacgccgacagtgacctggaagtgatggaccagttcaaactggaattatacgaagacgaagtattcgtattcacccccaaaggtgacttgtacaagatgccgaaaggagcgaccgtactggactttgctttcgccatccacagcaaactggggtccaagtgtatcggagcaaaggtgaacggaaagaacgcacaattaaagcaaacgctgaacagcggtgaccaggtagaagtcatgacttcaaacacccagacacccaaacgcgactggctgaacatcgtcaccacttcgaaggcaagaaccaaaatacgccaggccatcaaagagatagaagcccgccagacagagttcgccaaagaaaccatagaacgtaaattcaagaaccgcaaactggaatacgatgaagcagtgatgatgcgcctgataaaaaagctgggatacaaaaccgtaaccgagttctaccaggacatagccaacgagacaagagatgcgaacgacatcatcgaaaaatacctggaactgaagaaaaaggaaacggaaaaccgggaagatattgtctatcgcagcgccgagaatttcagcatgcagacagcacaggacgacaagaccttcaaagaggacgtactggtcattgatcagaatttgaaaggactggacttcaaattagccaaatgctgtaaccctatctatggcgatgatgtattcggatttgtaaccatcagcggaggaatcaaaatacaccgtaccgactgtcctaatgcacgggagttgcaatcacgtttcgcctaccgtatcgtaaaggcgcgttgggctgggaaaagccacggcaaacaataccccatcacgctgcgcatcgttggccatgatgatataggaattgtgacaaatatcacctccattatcaataaggaaaacgatatcctgctccgttccatcagcatcgactcgcacgacgggctgttcagcggcatgatgaccgtaatggtagatgatacttcaaagctggaatcattagtaaaaaagataaagacagtaaaaggagtaaaacaggtaaacagaggataaactcaccccaaacttaaaaaaatgaatgaactgcataaacgactaaaaagctttacatacgcttggaaaggcgtatgtagttttttaagcaaggaacacaatgcctggatacattgcgcagccatcatcgccgtaaccattgcaggcatccggtttgaaataacacgcaccgaatggcttgtcatcctcctgtgctttgcaatggtactggctgccgaagcattcaacacagccatagaacgcctggtaaacctggtatcaccagactaccatcccatagccggagacgtaaaggacatagcggcaggagccgtactgatttgcgccatctttgccgccctcatagggttgattatctttgtcccttatttttaaaggtgttaatttaccatttatttcactaacagttaaagaccttttataaaaaaaacagtaatttagccccgataatttttaaaaagtggaactaatgaagaaaattttgctttcaacattattgttgattatagggttaaccacatacgcagccgtatggcaatctcaaggagaagcagaaataacctttgagaaaacaacacataacttcggttcattccccgagtctagcccgaaagttacttgcgttttcaaattcaaaaattcgggagacggtcccttggtcatccatcaagcgatcgcatcttgcggatgtactgttccccaatatcctaaagagcccatcaaaccgggtgaaagtggacagataacagtgacttataatggagccggcaaatttccgggacatttcaagaaatcaatcactatccgcacaaacgggaaaaatgaaatgacacgtctttatatagaaggtgatatgaccccgaaaggcacagttgcagaatagaattctcacatcataagagagaggatgtatcaaaacaaaagaagattcgagtttgatacatcctctttttatatccggaaaacactgccccgcctgcctgtatccaagtaaagacaaaaaaataagaaaaaaagaacatttttccccaataataagccactcttattctgattaaaataacgtactttgcagcaaatttaagagaacaatgacaaacaagctattattctttgtcctgctggccctctgtttcagtggctgtgacatgctggaaacccatccatacgatgtacatattacaggagaaagagaactgaccaacaaaaacatccagttgatagaaaacaaaatgcaaagcaaaaaaacaatccgctttgccatgatcagtgatacccaacgatggtacaactctaccgaagatgttgtaaaagccctcaatgcccgtggtgacatagactttgtcattcacggaggagaccagtccgatttcggcgtcacaaaagaattcatatggatgcgggacatatttaacaaattccagatgccctacgtatgccttttaggcaaccacgactgcctgggtacaggtgaagacgcatacagagccatttatggagatcccaacttcgccttcacagccggaaatgtacgctttatctgcctcaataccaatgcgatggaatatgattattcggaaccggttcccgatttcaattttatagaaaatgaactgaacaacctgtcgcctgaaatagaaaaaacggtattcgcaatgcacgtaaaaccttttgaatttgtattcaacaacaatgtagcaaaaatcttccaactatacgtcaaccagttccccaaagtccagttctgtctttacggccatgaacacaaattcgcagtagatgatctattcaacgacggagttctgtatttccaatgcccctgcatagacaaacgcatctacttattattcaccattaaagaagatggaacctacgattatgaaacagttgaattttaaaaagatatttctgaacctattgtggccactattgccttttacggcacaagcccaagaaaataatacactttactccatcttatccaaagacagcatacttgtctcctctccttccgttcaaaaccaagaggaagatattgtaacccaaatgccaaaccggcaccataaatacgacaagcgcgtacaccgttacaggcgtgcgtgggaagctttgatccccacccacaccaaattacagtacgccggtggaatgggcctgttatcctggggcataggctgggattatggaaaaagaggccaatgggaaaccgatcttcttttgggcttcatcccccgctactcatccaaacatttcaagatgaccatgaccttgaaacagaattatatcccgtggagtatctggctgggcaaagacttctcgctagaaccgctgactaccggaatctatttcaacaccgtattcagcgatgatttctggacaagcgaacctgagcgctatccccgtggatactacggattttccacccgtatccgcacccatatctttctgggacaacgcgtccgtttcgatgtgcccgaaaagtaccggaagttctctaaaagcatcaccgcattctacgaaatcagcacatgcgatttatacgttgtcagtgcgttcaacaacagttatttgaaacccgatgactatctgagactatcatttggattgaaatttcagatattctaatcaaatcatgaggatgtttctctattttttcactatttttgggcatttattatgataaatttcaaaaataacaacatagagaaacatgaaacaagaagaagaaaaatcggttggattgcccgataacgcgttccgacctctgaaaccgggggaacaatatcaccccatcatgtcaccaaacaaaaaatatcccgaagtaaacctatggtctgtgctatggggtatcgccatggcggtattattctcggcggccgcagcttacctgggattaaaagtgggacaggtttttgaagccgccatccctatcgccatcatcgccgtaggtgtatcgggagccgccaagcgtaaaaacgcgttaggtgagaatgtcatcatccaatccatcggtgcctgttcgggagtcatagtggcaggagccatcttcacattgcccgccctttatatattgcaggacaaataccccgaaatgacagtcaacttctttcagatgtttgtcagctcactgctgggaggtattttggggatcctgttcctcatccccttccgtaaatatttcgtcagcgacaaacatggcgaatatcccttccccgaagccactgccagtacgcaagtgcttgtttccggcgagaaaggcggaagccaggcaaagccattgctttttgcaggactaataggaggtctgtacgatttcattgtagccacattcggctggtggaatgaaaacttcaccacccgcgtatgcggctggggtgagatggttgccgaaaaagccaaactggtgatgaaaataaacaccggtgcagcagtattaggcctaggctatattgtcggcttgaaatacgcggctatcatttgtgccggttcattggtggtatggctggttattgttccaggtatggccctgttgttcggcgaccaagtgctgaatgcatggaatccggccttgacacaaaccatcagcgaaatgtcacccgaagttatattcaaggaatatgccaaaagtatcggtattggtggtatcgccatggccggtgtgatcggtatcgtgcgctcatggggcattataaagagtgctgtgggactggccgccaaagagatgggcggcaagaaggtggaagcaaacgtcatccgcacgcagaaagacctttccatgaaaataatcgccttcgggtccatcttcaccatcctgctgatcttactgttcttcttttttgatgtgatgcatggaaatgtattacacagcattgtagccatcctgctcgtagccggcattgcattcctgttcaccaccgtagcagccaacgctatcgccatagtcggcactaaccctgtatcgggaatgacactgatgacactgatacttgcctcagtagtaatggttgccgttggactgaaaggtgctaccggcatggttgctgcactggttatgggtggtgtggtttgtacggcactctctatggcaggcggattcatcacagacttgaaaataggttactggctgggcagtactcctgccaaacaggaaacatggaaattcctcggcacactagtatcggcagcaactgtgggcggcgtcatcatgatcctgaacaagacctacggcttctccaccggcgcattggcagctccgcaggccaacgcgatggcagccgtaatagacccgctgatgaacggtgtaggcgctccctggctgctttacggaataggcgctgtgctggcattggtgctgacctacttcaaagtacccgcactggcttttgcgctgggtatgttcattccactggaattgaacctgccgttgctggtaggtggagcggtgaactggtatgtcactacccgcagcaaagacgaggcagtgaatgccgaacgtggcgagaagggaactttgctggcatccggattcatagccggaggcgcattgatgggggttgtcagtgccgccatgcgctttggcggtatcaatctgatcaacgaagaatggctgagcaacccgttgagcgaagtgctgtcaatggccgcctatatcctcctgatcatatggctggttaaagccagtatgcatataaagaaaaaataaccctttttcaaataccgtgaaaataaaagctatatgaaacgaatcttactaatgagtttacttgcaatctctaccgcattatctgcccagaaacctgtagagttggaattatggcccgatggcgcccccaactccaacggcatcaccactcccgagcagaaattagagaacaaccggatttccaatgtcagtgagcctacccttaccatttatccggcagccaaaccgaacggactggctgtcgtggcttgtcccggagggggatacatacgcctggcaatgaatcacgaagggcacgatatggcagactggttcaacgcacaaggcatcacatacgccgtattgaaataccgtatgccaaacggacaccatgatgtaccgttgagcgacgcccatcaggctatccggctgatgagagaacacgccaacgaatggcatattcaaaaagtgggtatcatgggggcctctgcgggcggacatctggccagtacggcagccacccactatacagccggaacgcgtccggattttcagatcctgttttatcccgtcataagcatggatctgtccaactgccataagggctcacgtgacaatcttttagggaaaagcccgtcagaagagctagtgagactttactccaatgaactgcaagtaacaggcgacactcctcccgccttcatcatgcatagcagcgatgacggagctgtacccgtcagcaacagcgtgagctattacctggcgctggtaaagaataaagtccctgcttccctccacacctatcctatcggcggccacggctggggtttccgcgacagctttacctataagcgccaatggacgggagaattagaaaaatggctgagagaaatactgtaaaaaagcaaggagatgtggcaaaacaaaaatgactgctccgaaaagttacagatagtaattataacacttattcattggccattacctgtcacaggtgtggtataaacgtatttgaatacctatgcgacattatagaccgttgtgccgcatggcttcccaatatctatagaaaaatatcgtgatttacttccgggcaaatggaagcagacacaaaaatagccgccccaaaatccggacggctatcttttttatagcttatacgctatcgcggaaagttgtaccaatacagagtttgatgcgaccctttctttagtcttttaggatgctcaaattataaattcatatttccaaaaactggattttgacacacccactttctatttccgataaacacctgcatctttatctgcagaagacaaaaaacaggcattcgtttctctttcgcttattttcttgcgccaagttgaatatccaaatgatacaaagccacatcaccacccagcttgatcttgtccaaaataccctgaacggtagcttcctcttctacctgctcgcgtacaaatccccacaagaaatcctgagaagccttgtccttttcagcagaagcaacatctaccagtttgtcaatcaattcggaaacatggcattcatgcttgtatacatgctcgaacacatccagcggagaagcccattcctgaggaacagcatccacagcccccaccttggcttgtccgccacgtttcatcacatattgcgccaacacatcagcatgatcactctcctcatgagcctgcgctttcatccatgaagcaaaaccttcatagcctttcgcagcgaagaaataagacatggaaagataaagattggccgaccacatttcggctacaatctgagcattaattgcgtcttgtaatttttgtgaaatcataatttttattttttagttaaattgtaactgttgcaaatatataatttttctagcgattaacactatgtccattcacctttttataaaaattatattttatctcatccaagtctttgcgattcaaaagaaaagtcttacctttgcacccgctaatacgggttattagcattaattcaaatcattaattataaaaacattatttagaaatggcaactaaaatcagattgcaaagaaacggacgcaaaagctatgcgttttattcaatcgttatcgcagacgtaagagctccacgtgatggtaaatttactgaaaaaattggtacttacaaccctaataccaatcctgccacagtagatttgaattttgaacgcgcacttcattgggtaatgtgcggtgcacagcctactgacacagtacgtaacatcttgtcaaaagaaggtgtttacatgaaaaagcacttgctgggcggtgttgccaaaggcgcattcacagaagcagaagctgaagctaaattcgaagcttggaagaacaacaaacaatctggtctggctactttgaaggctaaactggatgaagcaaagaaagctgaagcaaaagctcgtttggaagctgaaaagaaagtaaatgaagaaattgccaagaaagtagctgagaagaaagctgctgaagccgctgccaaggctgaagcagaagccgctaacgctcctgctgaagaagcacctgctgctgaagctactgaagctcctgctgaagcataattcaattttacttcaaaaagaacagctcctctgatctatatcggaggagttttttatgctcttatccgaggaatcaaagggagtttatctcatcttccgaaagtccggtaacttttgcgatttcagctatggaaagcccggcattcttcaaatttcctgcaatagctttggctttcatccattcaccttctgcaatgcctttctgaatagctgtattaatcacattgttccaatctctatatactttcaaactctcctcataggcataaaggttctcttttgagaactgagcaatttcggcagcctcaaacagccggttgaacacacgttcctgaagggcagtgggacgttccatcaaacgggccagattcttgagcacaaacatccatttatcaaacaacgtatccaactcctgctcggttttatggaatttaggcatttccagatacacaaaagtcagtttgtcaaaaaacacttcatgagtagttgtatccatcagcttcacttcatggcggaagccggaagacgaaacatcatccaaggcaaaattcaagataccgatcacatacactgctttcagttcatagtcccagatttcccctttaatagcctgttccctgataggataggtagcataataaatactccggtccttgaaaaactgttgctcccctctctgcatttctatcagaatcttttctcctttttcattttcacaatagacatcaaagacagcccggcggtcaatctctttgctgcccagatgctctgtattcaagtaggtgacatcctcaatgacctgcttgccatcgaacaaggcattcaagaagccaataagaatctctttgttcaagtcggttccaaacaataatttgaatgcaaagttcgtatagggatttacatatctttcacgcaatccttcactacacataagcgtttgatatttaaagttattttaattctgttgaaagcagttcaatacaaaggaacgaaaaaaagcggattttaagaaagttatctgctaataaattgttaatgttccaattgtacttacaattcatgtacaatgacaacacattctatccttatctcttcatgaaaagaatatctccatcttccctaaaaggatgaaaagccgataaattcatatctccaaaaagaaaaaactatcggcctatggtgcttgcttcttttctcccaagaaattattccaaattaacccatgttataacgggattatgatcagaactacgataaggatcttctctataataagatgtatatttaaatccccaataagcaggctcactggcattgatatcccaaggagcagcaccaactatttgtgaagtcagcgtaggagaacttaaagaatgatccaaatagccaacctccccacgataacaataactccaagccgcaggtgaatatttctttagcaaatttatatacccagcatccgtaaacaccttaatggcatcctccataccgtagctgttcaaatcacccaaaaccagcacatccgtatcttcataataagcaacaagctcattatatactttcaaacactcacgcgcttccataaccctacggtcggcagaacctccctgaccgtcattcttatctataccactagttttagctttaaaatgattcatagctaaaatcactttcgctttatcatccttcagttcaaaacattgaactatgtaccgcatcttcagattatcaaaattatagcttttaaactccttataaggcaaaactttcactttatcataaataaaaacatttgtttgtacctttgatgatttttgtccgggagtattcaaccaagcataccgttcttcccctaacgcattgttcaaagacctacaaagataatccacagtaaaatctccctgttctacttcacaaatagcataaatatccgctttcgcctctttcaatgcagctaagattttagcatgctgacgcaaggtttctgcatttcccgtattaccatacatataaaaattttccgcattgaaactcatcactttcaaattataatcatttacagtaggagcgacagaccgagcattataagaaactgacggcttttccgttaatgtaaaatgataaccggaagtactataagtcactttacctttaaccccagccatctcacttcctatacgaagtgtgttacacgggtcaatcaaagggaactctgatgtaatcagcaatttatcaacctcctgcttttctacccatttggaatattcaacaaccgacgggaggtttacatccgcaaatgcacgtttcaccttggaagagacaacaatagttccttgaggtttcgagccgctatacgtctgagtgacaaaaagcggattgacaattgttacttctttaccagctacagacgcagcccattcaggagaaaaatccgaaggaaaagttaccttcaaattatccttttccggaaattccatttcttccttatccgcagaatcgctacaagcaaaacaaaaaagggacaaaaggaagagaaaacatacttcactttttttcataccttatcattcaaataagaaaaagaaaagggagttcatacttttacagctaaactcccttttgctcattattaagaaaataatttattcagcctcatccaatgattctagaacgaaacgactttcctcttcgctccaaacaatctttgccacataagaagcggtacccgtactagtataaatcgaagaaataactttataattagtcacctgtccgtccacaaagactggttccggatgaactaattcgataaacttcacaagtcccaattttacctgttctatacaataagcatccatctcttcatccgtagtcaaattggccattgctccggttacatcataatactttttacgcgtatatccttttgcattccagttgccataagcagaacttgcgccataataatattctccctgacccactttctgagtatccagataaccttcatcaaaatttgccgccacataatcaaccacaagctgaaaatcttctttctgcatggtgatggtttcaaacaacaatccagaaggaacagtacgtttaaatacccattcattctctttataatcgtattcatccacttctttgtttacgatggtttccgattcatttctcattaccagcacattgtcaatctgcacactggtagtcaccccatcaggagccccttcataaacgaaagcaatataaatattcttaccggcaaattcatccagtttcatacttcctgccctcgccatagagccatagcctttaaccggttcctgaggaatagagaaattatctgttacatcttcccattccgtatacttattggtaatactgcccgaattaccttgaaaagtagaggacacatacacctttaaagcatcccccttataatttccgatacagacgtcaaaagagaatacatctcccacttctgccttgaatttcggtgagataatccatgactgtacttcaccatctgccttatatgcggaacattccgtataaacattattactatatgccttatcataccaaggtgctgttccttttacagaataattcaaccatccagccacatccgtagcttccttatctacgacattacgttcaaaatcttgctccaataccggcacttctttgatttcagtggtttcctgcatataacttacagaagcaaacgaaccattgtcacaggtataatatttctgggtgagccatggaataataacatccttggcactttctgtttctttgaaagttttctctgtatattctacagtatatttctggacattactttggtctgtttcatcaaaaccttcaaaatatttttcattataatcacaagcagtcattaacgaagcggctgccagcaccatccatatatttttcttcatattctaaaattctttaggctttgagtttaaaaattaagtttcaatttcaagttgtatgtacgaccgaatccatagaagatgccataagcagtttgccagtcatgatttgaaccatctgtagcatcagaaatatattcctgatcgaacaaattgttcacaactcctgaaagaatagcgtttaccccacctatcttaaatctataacttgcatttaaatcacatacatacgctgaaggaatacgccatggggaatcatacaccaacgtcttgttgatattatatgtcaaatcagaagattcaatagcccagtcagaataattacgtccatagaacacacaatcgaaacctacgcgtaatgcctttgatatctttgccgtagcacccagtgaggctgtggtttgcgcggagcctcctactctgacaccatccaaatccaatgcaacagaagcatggtcaggagccataataccagtagcctctacaaattttccattttcataagccaaaggctgtcccaatgaattgtaaaaatatcctttcggcgtgctgctccagcgccaatttccaatagagaacataccgttaatatccaaccatctgaaaggtcttgccacaaagtccagttcaattccttggtgagtggcatcgaccccctgcatattgatagtggcacgatccacctgattgcctttctcatcttcaatattcacagatgcggcattggtcttgtcaaaccactgggtatgatatacattcagattagcagtgaaataaggagaacggaatccatagcctaattcaaaagaaaaaatcttttcgtttacagcatccggattagtagcattactagttgcactctgtaagaaagcgccacctgagaagaaaggagcacgactgatgtaacctacatttgcaaatacattatgatattcgttcagattatagttggcaccacctttcactgtatagcctataaaattcaccgtttccgattcggcatgctgcttgtcataataaaagcggtcatatctccaatatccggtattggaaattgaacctgcaagaaacgcactcaatttatctttattgtactcagcttgtgcaaatactccttctgacatagcatagccatcataatcacgatataccacatctcccacctgtaattttttcttcacatattccggagttcctgccaaggcattgttcaccgctttcaccttctctcggctttcatccaagaaatatttgccgccatacaaatcactcaattcattagtatgcgtacctttataataacggaaatctatacctccgtaaaaatcaatgtaatcaccaaattttgtcgtatatgtagacaacaagccataccagttgtgttcgttgatactttttgacatagccatcatagaaccgttatcactggcttcattcatatcataaatctggtcataagcaaatgtaccgtctgaatttcggaaataagtattcaagtttcctttataagagccataccacatattacgataagtagtaccattggcatctttcttatatccttgtcccgcattaccatatccgcggccaatggaaacatatgccgctgtgctcaatgatgatttttcattaatttgccattgatggttcaatgaaagctgcggcttgtgatattcattgtgcgaagcagacatacgctcaccgttagggccgaatccataagtaggattatagcgatacggactcttgtcacccatataatttttcactgcctgccatcctttgatgcttaaaccgtctttattactgcgctggttatgccattggggtgatccgaatgcagtaaatgaaatctggtgtgcatcattgatacgtttggctatgtttacaaaataattataagcagagaattcggtcccttgtatatatccgtctccccaagtctttccaccaagtaaagtcaatgcccatccatctttggacatacctgtagaaacatggaacagaagcttgttatagccgtcattccccattgcataagagatagaaccaccttttttctgatcaatggtacgggtaacaatattgatagagccacctaccgaaggagcagacaccttcgaagcgcccaaacctcgctgagtctgcatgctacgtgtcacatccgacagtcctgcccagttactccagtacaagcctccccattccatatcattcattggaataccgtttaccataacagcgatattttcgctcttgaaaccacgcatgttgatttttgaatcaccgtatgcaccaccttgcttggtagcatatacacccggagttgattttaatatctcagggaattcctgtgtacctaatttttcttctataaattccggagccaaagttgttacagccaccggagtcttacgggctacagcaatagaagaagttatcacaacatcccctaaagtctttgcatccagtgataaagcaatagttcccaaatcaacattgcccttttgagtaaccttcattgttttgtcctgataccccaagtatttaaactcaagagtagccttagaagaggtaagtttcaacacaaagttaccgtcaatatccgttacagtacccagtgtcgtaccgctgaccgatacagtggcaccaatcaatggctcattgttctcggcatctactactttaccttttactgttccttgcgcaacagccgtagcagtgaaacagattgtcagaactgccaacaggaggaaatgctttagatgatttctcataattttgtctttgatttaaattaattagttagtatttcattcccaataggaaagacaaagataaaaatttaattcatataaattgaatttatattagattatttaaacgaaaagggtactttttaggcggaatatgacaattatgttaagaaaagaacaaaaagccgcctcaaaagaggggaaaactgtccggaaattccagagcaactgccacatattactgtagaaagaagggcaaatggaaaccgccggaactattttcagcataccttattcccaaagccgtatccactgatccggacaaatccggcccgcccctacgacaaaacgacaggtcactttcattcaggctctctcactttcaaaatgacagagcaaaaagaaaacgaaagaatgtgcatacaaaaagaggcgcaccttcatgggtacgcctctctatcctgttcctgtattgtctgatacaggctatttcatttagttaaagatataacggacactgaactgtatggaatacgtagaattgaaactgttcagattggaatacgtatcagtcagtttctttcctccgttcttctggaactggtaagcgccgcccttatagctcaacaaggaagtattgttcaccgtcttataaattccccagtcgctgttcagcaagttcaggaagttcttgatatccactccgaactgcaaggtattgcgcttgccccctacattgaggaagaaatcctgattgaacttcaaatccagctgatgatgccagggcatgatggctcctccgcgttcggcatacttgcctttacggcctttcagataactgtcctcattaatgtaagcccagaaatcatcgcgctgctccttggcagaataagtcacctcacccgtcttgctgtcagtataatcggcaaagttccacttatccagcgcctcgcgggatgccggaatgtacagcaagttgtttgagccgtaatcgcctacaatatttccggtgaatgtataggaataacgggcggcggaatatcctccggcatagcccatgttcataccctcataaatcaaagacaaggaggaagcgaaattcttggcgtatttaatacggtaagcggcggaagccagcacacggttgggcgatacatacgtaccatagccggtctccgtgtcattatttccgttgacagagtaacggttgttgtaataagccgagttcacctggtcgccgatgccgtcgccatacgacttggcataagaacgggtgtaggaagcggaaagatgcaggccgaaatcaaatgtcttggccagtgaggcggtgagtgagtaataataagcgctgtttcccgcattggtgatataataagcatccgtcttgttcgcattggagtactcaaacattctgcggacatcacccggagctatctcctgctctcctttaaacttacgtcccaaattggtcactgtagccggattgaactctttactgaaaataccttccaacgtaaagtcaatgtctccgggaagttttgcatcaaaagccaatgatgacttccaggtggcattcatcttcaagtcgcggtcaatgatggtggctccggaaggtgcggcaggatcggtagccgccggaaggttcaagttaggatctttcaacatatcagccacgctggtgtggaaactcggttgtccgtacttagcgtccttctgctcgttataataataggtgctttgtccgcaattggcattacctactgccgaaaccagccatacgaacggcagacggccgatgaagtaaccgctaccgccgcgcaatacatacttacgctcgcctgtaaggtcccagttgaagccgatacggggggaggcggtcagctggtaggatgaaggcaactggtctgtggcgtaatgatatccgtcaaagtcaatctgtgcgaaattcttgttatagttgttcttcagctccggataaatgggcagttcgaaacgcaccccggcagtcagtctgaagttgtctgtgatattcatctggtcctgcagatagaaagaaagctgctggtacttcatgttcgccaggaactgggaaccgtccccggtgttggaataagtgacaccgaaagcagccggagctctgttgttcacaaaatcatcccaagaggaatagacataataaccgctacccgcctgcatgaatccgttcactgccttattggactcaaactggataccgcccataaagttatggataccgctggagaaattgaattcatcggtaatgacaaaggtcttcacctggcgcaagttcccttctgtaaaggggtccgggccgaatgaggcatacagggagccttggtcaagaatatccaccgtagggaatgttccaccttcgtaagtacgaggttcgttctgataagaataagtaaaacgcaaggcgttattgattgcgccccactttgaattccattcggaagctatggaagtgaagttctgctcttgcatgtagcgtgagctttcaaaatacataccggcattcgctgtacgtcccgaactgctcttgcccgcactgccgtctactccgcccggataaatgattgaatccttaaacggagtggtggaagaggaagggttggaggaatacttggaatgggtatgggtgaaacggaaattaatcttgttgttgttgttgatgttccagtccagacgccccatgatcttataagaaggagtttccaaagagtatccttgataacgtcccggattatagttgtatttttccgacaggtattggctgatgttgttcatccccacaaaggtacggccgcctaccgttgtggtgttctcgaacggacggtgcacgatgccgttggtgctccattcgtcattggcgccgctacgcgctatgcccgacggacctgcctgcacattatcctgatattcgccgttcacgaagaagaataacttgtttttaatgatcgcacctcccaaagaagctccgtaggtggtactgtggtcacggttgcgggtcagctcatagtcctctaccttattaccggtaaggtgggtattggaagtatacatataggctgtacctttgaactcattcgtaccactctttgtcacggcgttgatggcacctcctgtaaacccgctctgacggacatcaaagggagtggtggaaacggaaatctgttccaatgcatccagagagataggcgaaccgcctgccggcaagttcgagccgataccgaaggcattattgaaagcggctccgtccacagtgacataagactggcggtagttacctccacccactgagaaaccgctaccgatattggctccctgaggggtcaggcgcatgatatcattcatgctgcggctcaccgtaggcacttccgacattctggccgcatcgacattggtcaccgctccggcgcggtcagacttcatattgctgctcttggaagcggttatcactacttcatccagcagttcggtagactccttcaagttcgcatccaatacgtaattctctcccaactggagattgatgctcttgtaaaccactgattgataacctacataagaaacttctactttgtaagggccgccggcacgcatgccctggatggaataacggccgtccacattggtaatggccccataatgggtgccggacggctcatgaatagcctgaatcgtcgcgccgataatggcttcattgctttgatcgaccacctttccactcattgacgaggtagtgacctgagcgttaacagtagcagcgattaccaacataaccaccgcaaaaaaagatcgcattctttttaccataaactttttattaattaatattataattaatgtcttaaaagacgttgcaaagatagctaatagaaacgatatacaaactacaaatcggttacaatttacagtggcaggtctatagaaagagaatttatagttttatggtgaaccacattcatcctgccggatgaccccgggacacgggccgacgggaattccatgcggtgcgcgcataataagataggtgtataataaaaaggctcttaacctcaaaaacgtctttatactgaggaagttgccatacatttctgacgaaccgttgtgtgtatatgcaaacttacccaagaatacgttactgttcgtacacttgggtaagattttatagacagggcgtcatcagtcttccatcagcttgcggtagcgcacccgtttcggctcctcattacccaaacgcttcatcttgttctcttcgtattccgaataggatccttcaaagaaaaagacctcactgtttccttcgaaagccaggatatgggtacagatacggtccaagaaccaacggtcgtggctgatcaccaccgcacagcccgcaaaatcgtccagaccttcttccaacgcgcgcagcgtgttcacgtcaatatcattggtaggctcgtccagcagcagcacgttgccttcttccttcagtgccatagccagatgcaggcggttgcgctcaccacccgaaagcattccacaaagtttctcctgatcggctcccgaaaaattgaaacggctgaggtaggcacgcgcgttgatatccctgtttcccagacggatcagttcgtttccaccgctgatcacctgataaacggacttggcagggtcgatatctttatgttgctggtccacgtatgccagtttcacggtctcccctacctcgaaagtacctttgtctacggtttccagtcccataatcaagcggaacaaggtagtctttccggcaccgttaggaccgattacaccgacaatgccgttagggggcagcatgaaattcaggttatcgaacaacagcttgtcaccataagctttcgccactcctttggcctcgatcaccttgtttcccaaacggggaccgttcgggatgaagatttccagtttctcttccttttctttcacatcctcattcaacaatttgtcgtaagagttcagacgggcctttccttttgcctgacgggctttgggagccatgcgcacccaatccaactcgcgttccaaggtcttgcggcgtttgcttgccaccttctcttccatctccatgcgtttggtcttctgttccagccagctggagtaatttcctttccagggaattccttcgccacggtccagttccagaatccatccggctacgtggtccaggaagtaacggtcgtgggttacggcaatcaccgtaccttcatattgctgcaaatgctgttccagccagtcgatactttccgcatccaaatggttggtaggctcgtccagtaacagaatatccggcttctgcaacagcagacggcacaatgccacacggcgacgctcgcctcccgagaggttcttcaccggctggtcttcgggcggacagcgcaacgcatccatggcgcgttccagcttgctgtccagattccatgcgtccgtagcgtcaatgatgtcctgcaactctgcctgacgggcaaagagcgcatccatcttttcagaatcctcatagtattcgggaagcccgaacttattgtttatttcttcgtattccgccagtgtgtccacgatgctctgcactccttccatcaccacctctttcactgtcttttcatcatccagatgcggttcctgtgccagatagcctacagagtagcccggcgagaacaccacttctccctgataacttttctccagtccggcaataattttcatcagtgttgatttacccgaaccgttcagaccgatgataccgatcttagcaccgtaaaaaaaggataggtagatgtccttcaatacctgtttgttcgcctggaaggctttgcttacgcccaccatcgaaaagataatctttttgtcgtctgccatattctttatattattaatttatgtaagttgccatatttcactgtttttcctccatctttctgtaataccacggatgtgtgaagaactcatacatcagcagcagaacgacacagataccgatacatatccaataaatagtatcgggatgaccctcagtccacatattctcaaacaggaaaccaatcagtactcctgcctcccacatcagctgataggtattgtttcccgttccccgctcgcaatgcctcggcaggctgatcatttttataaagaaacgtgacacagtggttccggttcccatccccaacaaaataccagctatataactgttcatcaagctattggaaaaagcgagcaataacaaccctcctatcattgccgcctgccccagctctacctccgaacgaccggaagcatgagaaagcacgtaacgcaaaagcagcaaagacaggacaaagcctatcaggatacaaacaaaaaacaattcattgtaaatatgtgccaccaatatcccaaagataatggccaccatcatcatattcatccccggccacaaagtgcgcggcagcaaaaaacggtccagcgagaaccatgaagtgctgagcggagcacggaaaggaactttcaccgccggaatcagcaccagcgccaacgctcccagagccatactggtataaatgatatggtgaaaattccaataaggataaatatagatccccaaggcaagacccaccaccattccaaaacgacccgcccaggcaaaagcgatattggcgtccgtgcggcggcgggaagcagtgacatcaatcaccagtgtactgcccgtagtcatggtaatgacgctgaacagccctccctggacagccctgaccaaagctacgaaccctacggtcgcaacgtacggatatagcagactggatgccacaaacaggaatatcgctataaagcacacacttttacgtttgaacgtatcaataaggtagctgttgaatgttcccggaaggaacatggccagcccgaaaacagcaatggctgctcctgcttccgcataactgcaataccagtgccgcaccatccataaaggcagcacaggaagcatcatgtatagtgatgcataaagcaaaaaattggaaagggataacaaaaacatattcccagtccacagttttgccttttcatacggaaagaagaagtcatcatacatatcagcaaaaacttttaatattgttcgtcttcgttagggaaatccccttttttcacatcatccacatactgctgtatggctcccgtcataactgtatgcagatcggcataacgacggaggaaacgaggactgaaaccgttggtcatccccagcatatccgatacgaccagtacctgcccgtctaccgcgccaccggctccgataccgataacgggaatggtcagttccctggccacacgctctgccagtgacgcagggattttctcaagtaccagcgcaaaacaccctgcctcttccagcagatgtgcatcgctcaacaacttctcggcctcttcctcgtccttggcgcgtacagtataggttccatatttattgatagattgcggcattaaccccaaatgtcccatgatgggaatgccggcagcaatgattttctttaccgcatcaatgatctccacacccccttccagtttcaaagcatcagcgtgcgtaatcttcattactttgatcgcattggtcaccgcttcgtattcggaagtctggtaagtgccaaaaggcagatccaccacaacaagcgcgcgtttcaccccacggaccacagactttccatgataaatcatctgatcaagggtgataggaagtgtggtcacatttcctgccatgacattcgaagcggagtcgcctaccaatataacatcgatgcctgcgccatctacaatctgcgctgtcgtgtaatcataggaggtaagcatagaaattttctcgcctctctgcttcatttccaccaaacggtgggtagttactttgcgtgtatcgcccgaaatatatcctgccatatttactttaatttataaaaaacggctgcaaaggtagatgttttagttgacattacctcatcatattcttcattttttcgaaactgaatccattaaagtcctgaataacagcatttgccttgtcgcgtatttgctcttcagaattggtggtagccagtcctatcacagtcattccggcacgattccccgcctcaaggccatgaaacgagtcctcgaaaaccacacagttctccggcacggtgtcaaaaactgtcgcacctaacagaaagcattcggggtcaggcttggaatgagtaaacatttcagcagtgaggatacggtccacactttgcttcaattccgggtgtgctttatatacgttgctcatcttcatctcatttgaacttgtgactatagctatctttaccccgttttccctcaattctttcaggaaagcctctacgcccgggatataattatataacatatttttttcaaatttgttcaaatcttctgtaatttcatgctgcacctcttccattccggcaaaatagttggcataaatctgtgtcaaggtctgtccttttatcaaccggccgaattcgggaagctccggatggtatttccgtccttgttcattccagaagatactatactgagtctcagtgtccattaccactccgtcaaaatcgaataaagctgctatgctttttgttgaattcatattacttttagtttgatttaacgccacaaaggtccgaataatcctccatattcctaactttgcaaagcttaaaaataacaaaaacgcgaatgaaagaaaacaacccgcacatactgggtacagaaaaggtcggaaagctgcttttagagtactctatccctgccatcatagggatgacactgacatcactgtacaacattattgatagtgtatttatcggtcatggtgtcggcgccatggccatatcgggcttggctatttcttttccgctgatgaatctgctggtggcattctgtacactggtcggggtgggtggcgctaccatttcttctatccgcctggggcagaaggatacggacggtgccgagaaggtgctgggaaacgtaacggtgctctgtgtgataaattctattttctacggaggcatcaccctgctgtttctggaccggattctgttcttcttcggggcaagccatgacacgttgccatacgcccgcgactttatgcagattatattaataggaagtcctgtcacctatgtaatgatcggactgaataatatcatgcgtgccaccggttatccccgaaaggcgatgctgtcctccatgctgacagtgggatgcaacattattctggctcctgtctttattttctggctcggttggggaatccgcggagcagccacggcaaccatcctttcacagtttgccggcatgatatgggtgctgagccatttcatgcaggaaaaaagttatatccgcttcaagaaagggatattcaaattaaggaaacggatcgtagagaatatcttcagtatcggtatgtcgccgttcctgatgaatgtctgcgcttcggccattgtcattatattcaacaagagcctgctgctctacgggggcgatctggctatcggcgcatacggcatattaaaccgtctgctgatgctgtttgtaatggttatcatggggctgactatgggaatgcaaccgattgtgggctataatcatggcgcacacaaattcggccgggtgaagcagactttgaaatattgcatgattgcaggggggtgcatcacttcgttgggatttgctttcagcgaacttttccctaatttggttgttaatatgtttacagacgataaagaacttacagcattggcacgcaccgggttacaaatcggagtactgatgtttcctttcgtgggaatacaaattgtaatttccagtttcttccaatctatcgggaaagcgaaaatttctatcttcctctccttgtcccgccaactgttgtatttattaccctgcctgctgttactacctcattggtggggactgaacggtatctggctcagtatgcctgtatccgatctgttagcgtttatcacagcctgcctgatgctggcacatcatattaaaaaattaaacaagatcacagaagtatgatatttaatgcagaaaacattctcttgataggttccatcctattgttcgtaagtattgtagtgagtaagaccggataccggttcggaatccctacgttacttgtttttttattggtcggcatgctgttcggaagcgatggtctgggactccagttccatgatgcgggcgaagcccagttcatcggcatgatggcccttagcatcattctgttctcagggggtatggataccaaatactcggatatcaagcctgtattgccacaaggcatactgctttccaccttcggtgtgttgcttactactattttcaccggattctttatttattggatttccggattctcgaatgtcagcattaccatgtccctgatgacggccatgctgctggcggctaccatgtcctctacggactctgcttccgtgttcaacatcctgcgctcgcaaagcatgaatctgaaacataacctccgaccgatgctggaactggaaagcggaagtaatgaccctatggcgtatatgcttactatcgtcctgatacagttcatcacgtcggcaggcatgggggcagacgatattctgatttcattcctgattcagtttgctgtgggtggcacatcaggattcctgctgggaaaactggcggtagcaatcatcaacaagattgacttgaagaaccagtcactctatcctatcttgctgctgagctttattttcttcacattcaccatgaccgacctgtgtaaaggaaacggctatctggctgtctatatagcagggatgatggtgggtaacgcacgcattgtaaaccgtaaggagatcgctacttttatgagcggcatgacctggctcttccaaattatcatgttcctgagcctgggattgctggtgaatccccatgaaatgttgtccatcgccataccggcaaccttgatcggcattttcatgattgtcctcgcccgcccgctcagtgtcctgctctgcctccttccctttaaaaagatgaacatcaactcacggctgtttatttcctgggtgggattgcgcggagcagtacctatcatattcgccacttatccagtagtagctgatgtgccgggatctactcagattttcaatatcgtattcttcattaccatattgtctttagtggttcagggaacgaccatttcatggatggccaaattactccatctggataccccactggaaaaaacaggaaatgatttcggagtagagataccggaggaaatcaatacagacctccgcgatatcgtactgacggaagaaatgctggcaaaaggaaacagactaatggatatgaacctacctaaaggtatgctggtgatgctgataaaaagaggaaacgagttcatgattcccaatggctctctgcaactgcacgccggtgacaagctgctgattatctcggaaagcaaaacgaaataaaaaatttgcccatgtgcccacgtgctgcgctatggtcccgcatggcaattggcacatgggcaaattcgcacattattcaactgagcaacagcatgatattcaatgcggagacaatcaccgcaatggtataaagcacgaatgaactccaccgggagttggcatatttgcccatcacccgtttggaagaggtcagtcctacttgcaggaacaccgtgaaaggcagctggatactcagaatcatctgagaaatgataagtccgtaaaagggattctcaataaagaagataagaaccaatgctatccccaaagaaatcaaaataccgaccttagagtggatatccttgatatgataagactcaccgaaaatacccgcaaagatagaacctgccgccataccactggttatggtggaggaaatccccgccatcagcaatgccagggcaaagatgattccggcatggctgcccagcaacgggtcaagcaacgacttcgcctgctgcaactcttccaccggagtccgggtacggaagaaagtagcggctgccagtaagatcatggcactattgatggcccatcctacaatcatggagaacaaagtatcatagaattcatatttcaatactttacgaatggagctctcgtcctgcttgttgtactcgtggctctgtatcacctctgaatgcaagaaaaggttatgcggcataaccactgccccaagtacgctcatgataatcagcatactgccctggggtatctcaggaaccacccaggaacggatcgccacaggccagtcaatatctaccaaaaacaactcatacagaaacgaaaggccgattacggatacaaaagcaatgatggctctttctatctttttatatgaattggaaaaaagcataatgacgacaaacatcgtagtaaggacagatccccaggcaatgggaatttccaaaagcatctgcaaggcaatggctcctcccagtatctccgccagcgaagtggatatggaggccagcaccgcgctgcccaaaatgggacgggatatccacttgggacaatactgcgtggctgcttcactcaggcacaatcccgtcacaatgcccaggtgggccacattgtgctgcaacacaatcaacataatggtagacaaggtcaccacccacaacaacgcgtaaccaaattcggaaccggccgcaaaattcgaggcccagtttcccggatcaataaaacctacagtaaccagtaatccgggaccaatatatttaaagaaatcaagaccacccagataacgcttgtggtctgtacgttttaattcatctataatgcgagacatgttttactttttttgtttgcacaaacttactaataaaaaacaaaaatccatttgctttgttcaaacttatagtttactttcgcttcaaaataccgatttataatgaaaagagaaacagttataatagcggccctaggcatccttactttggcaggatgtaataataaccaccgttcacaagtccgtaaattcaaacagacagccgaaaagaccaaccggtcctgccccacacgcatgaacgaaacgattacactggacagcacctgttataatgagaaagataatagtgtgagctatttctacagtgttacaggagaactggacaacgccacttatatgaacacccattatgccgcctttaaacaagccctgcaggatgcagtagacaactcggtggaaatggaggaataccggaaattcggtacttccatccgctatatctattattcgggatcaagtaaaaggcaactggctgcattctccttcaattcccccaaatagattccgtttcagcccatccggatgcatgataccacgctatggaagacttgaaataattgttccaaagcaaatatttgggagtggtgaatgaattggggatatacatacccattccactgtagttatccccatctattctgtacaaggatgaggtgggatcatgagtataacctgtataaacgaccgtcttctttaattgttgcgtaaaatcgtccggagccattcctccacacaatttttcaataaactgtaacatatcataggcatatcctttgaagttgctgctgcctttgccatattgctgcaaatcagctgtatccacgttcttcaggctatcctgattggacaaaatcacacttctgaccgcttccgccaggccttccatctgattgcaatccactgccgaaatggttccccaaccattatagttataataatctatataatctttacagattggccccaaataatccttgatcgcattttcatacaaataaggcatcacacttgcataaggaaatccggctgccggtatatcaagtacagaagcgatacagtatctggcagcatccttcagctcataatacacctcggcacaccccatcatacacgcatcaaacaagacaaaatcaaacttttgaggatttaccgtacgcaacacttccgccaattccggtatcaacgctgtgtcactggaataccgcccgccatcttgtcctatagaacgggtgccggtaatagtgggcaaccatcccgaaccgtgagatccaaagattattccataactttccgacgggtaagcactcatcatatcacctatcactgtctgcatgacggttttctccgtcgatgtctgagggggatatttttttctgatgttaccaataccaatcaaatcatagatagatgtattcttatcagccatcattgcatctatcgttcctttagacaggctgttgatacccccctgaccattggttacatattctacgatacaaggctccggccaactgatatccgaagcctcaccatcccaatataccaataaagcagccgaatccttcatagcctgaagtccttgcatcatcgtctgaatattattacgcaaactggaattcaaactgttatccgcccaaaagaatgccagaaccgttcttccggcatgttgctgaggaatcacgattgtttccttctcacaagagaagaaaaagcaggctgccaagaatagaaatagaatctttttcataagaaaaggattactcttccggtttcttgaacttgaacgcattggggttcacttcgcgaatcagcaaggtctttcctttttgatacttggtcttcatcttgttgatggtcttctgcagtttctttctgctgttcgagaaataaacaaagcaagtacggttcgtcagcccttcctcgttttccagataatttttcagctgataactgtattgtgagcgttccggcaacatcttattcttatccagactcacactgtccagcaactggatttccgtgaaataaaccaatgaatctgtaaacgatgcggatacgcctactatataaacagatttacttcctttcaatgagaatgccgagcataccgtcagtaccaataataaagagcacagaatctttatggatttcataattctaattttataattttattagaggacaaaagtagttatttacggacaaatacgaaaaagtaatagattaattaactataataatttgctgatgtgcccattaccatgcggcacatagtgcagccgataggcattattggtatattatgaacaaaagcacaagacggaagcaaccttccatcttgtgctttgttttcttttcggaaaccgaatctttcttaccctaaataagacttaagcagcttgctacgcgaattttgtctcaatcttctaatggctttctctttaatctggcgtacgcgctcacgagtgaggccgaatttatcgccgatttcttccaacgtcatttcctgcgtattaataccgaaaaacatctggataatatccttctccctttcggtcagcgtagagagtgctctatcaatttccctcgcaagtgactcattaaccaaggaacggtctgccataggcgagtcgtcgttcacaagcacatccagcaagctgttgtcttctccttccacaaaaggagcgtctacagaaatgtggcgtcctgaaaccttcaacgtgtccgagattttgtctacaggtatttccagttcatcggccagttcttccggagaaggacgacgttcgttttcctgttcgaatttagagaaggctttgctgatcttgttcaacgagcctacctgattcaacggcaaacggacaatacgtgactgttctgccaatgcctggagaatagactgacgaatccaccatacggcgtaactgataaacttgaagcctcgggtttcatcgaacttttcggctgctttaatcaatcccaggttgccttcattaatcaagtcaggaagacttaacccctgattttgatactgcttggctacagacacgacgaaacgcaagttggcacgtgtcagtttttccaatgctacccggtcgcctttacggatacgctgagcgagctctacctcttcctctacagtaatcaggtcttcacggcctatttcctgtaaatacttatccagagatgcgctctctcggttagtgatacttttggtaatctttaattgtctcattctctataaaacaaatttgggatgcaaatttacaacattaaatggaatacatccatttttgtttgaaaaatattagctaataaatcaaaaaagactatctttgtccttcttttcctaaatattttgcgaaaataaggttatcagtcctgtttgactataaaatcaggatgcacggaagtaacccttaccgtgcatcctctaaactttacctattgaaactttctaccttaaaaatcttcttattcctgtgtcaaatccactgcatagttcgcacgtttacctgatgggaacataccactcaggaacaatacctgatccggtgactgggtagcagctttcagcacatcttccaaatcatttactgatttgacaggttgtccgtttgccttcaggatgatgaagcctttacggataccggcagccttcatcttaccgtctgtcacacctgtgacttccacaccatatcccaaattcaattgtctcttcaattcctgaggaacttcacggaatgctgcgcccaagatatccatgcccgcactcttcaccactttcgttgttccctgtgcattcttcaaggtcatctcgatatccttttctttcttgtcacgcaacaccttgacggttactttgtcacccggacggtgtttagccaacccctcctgcaactctgcaaagttcttcacacgttttccgtcaataccgataatgacatcatctacttccaagttgccggccgcagaacctccctcaattatctcagcaatcaacacaccgtcggtggcgcccagttccttcaccttcttcttgatttcttccggcatcatctgctggtcatcattaatcggagtacccttgatgcccaataccgcacgctgaacggttccatattctttcaagtcggctataactttcgtcataatactggttggaatagcaaacccataacccgaataagctcctgtaggtgaataaagtacggaattgatacctaccagttcaccccttgcattcaccaatgcaccaccactgttgccttggttgatcgcagcatctgtctggatgaaagattccacaccattattatatacccctaaagaacgggctttggcactcacaataccggctgttaccgtagaagtcatattaaagggattacccacagccaatacccactcacctactttcaaagcctccgaattgcccacgggaatcgtaggaagctcatccgcttcaattttaaccaacgctaaatccgtgctggggtctgtgccgattacacgtcccttgtattcacgtccgtcattcagtttgacactgatcacatcagcattatcgattacatggttattcgttacaatatatccatctttcgagatgatcactccggaaccgaatcccactctttcaggagtctgcacctgacgctgctgaccgccgcctctgccatttccaaaaatatcaccaaagaaatcatagaacggatcacgaacggtaaccgtctgagtctttgattcttgagttgactttatatgaactactgcatgcactgaattttccgctgcctgagtcaaatccaccggttgcatttgagtggcgtccaacgcggcgagtcttgtattcggattttgttggaacacatcattaaaagccacgcttttgtttggctcgggtttcaacatagaataagccgttactcctgctacacctgcgctgactgctacaattgctgctgcgcctagtaccattttagttgcttgtttcataacttaatatctattaatttgttaatttcaagtttggtttaacatttatgacgctaatgtaatgacaaatattgtacggttgtaccgtttgtcagagttttttttcctcttttaacacagacagataagcacttaacaggggttaaccgcagaatctgccaaatttgcattcattatcaatagctgacagacagcaagatgacacaggatgcaacttgcctcatagatagttatgtcttgcaggaaatacttgcctctcgccggaatgcatccatataccccccctataaaagagcatgtccgtgaccggtctttccaactttactttttcaactggttcaatacccttcccgcactatccgaaagaacgacaacagctcctgccagaatagcaatatccttaatgaccagacgaccggcgcccgtcagcagagggaatccctgttcgccacttcccaaatcggggacccacacctcgggcgttgttacaaggaaagacaaagtgcccaatgtcatgacaatagccagtccggcccccaccaaaccggttttcggagagaagatgcctaaaaacgtcaagataccgatccccataatcaaaatacccaatccatgagagaacccataagtattgttctcttcatgccacaggtgcttcgtttcatcgagttcgccttctttcagcttatattctttatattcaggagcatccttagtataaaagaaactcataaagggactgttcgccacaaaaggcacaattccttcggcttcatagttccagaatttcagaccaccaatccatacaaaaattacaaggattgccacacggataagattgatacccagtttttgggcagatgctgctattgttaaaaacgcaacaaacagagattttaattttgccatcattgctttcattattaaaagatttaacttcctggtgcaaaggtcggtggttttccccctccggtaaatggcaatttccccatataggttggcaattattcccgcttctctcttttccggtattccgaaaggctctccttgttcattttcttaaagaaacggctgaacgtagccaaatcctcaaatcccagaatctcactgatttctttcgcactcttacccgtataaagcaacaagcgcttggcttccgcatccacgcgttcatgaatgacacgcaaaggagaagaaagtccgtaaagggaaaagagattagaaatagtcttgggagaacggcacaacatatcagcataatcctgtacttgcttcttctccttaaaatgactgtcaaccagtacataaaactgacgaatcacatcaaacatgttctcacgtcccgggtccacatcaaacttttcacgggctatgcgggtacaagtgataatgaaacgtttcagaataatacgcaacatttcttcctgcaagttgtcttgtattccacactcccccctgaaaatatcgacaatactgtcaagacaggccgactgggaaggcgaaagcttcaaacgcatgacacgggaagaaccgttaaacaggaatccgttacaagacacctcgctgtcatgcctgtaaatacaataaaagttactattgaataaaaaagtgaggtattcaccgcccactccccttatctgcacatgatgcaaaggagtaagcgaaatcatttcctctttttccagatgcatcaccacatgatccacttccacatccaacgttccatgccgcacccatataaatttataaagactcctgtcacgctgcaaaaaggagttttcatggaaacaggaagtcattgctatatttccattcaatttagtacgtaagtgatattccataactacttctgattaagtgatgttcccctactttttcaaaaataagatgacgggataaatataagactattcctttatataaaaaagaaatagaacaaaagaatgacttcccctcccactccctttatcagcattcgcgccccactgccatatcggccggcaggaattcccatccaatcatctcccatttgcctatacgaaaactttccatcccgtcctgtctcttttaatatttgttaaacatttccatttcttcgtccactcattaatttaatagtacatttgttgcatcacaagcatcgtagctatataataaaagaagagtaggacatcaataatgaacagaaatcttaaaagaacgtgtgtagcccatatacaacggttactgatatgtacctgtatattcaccctctttgcaaccatcggcaaagcctcccatgtacaggaaaacaccgagacggggaactatattctgattctgaacagctacaacgaatcctctccctggagcaacagcatcaccacccccattgttcataaaatagctggaatagagaacatggacgcttacatagagcatctgaatctttttatggtaggcgactccactaaaatcgagagattcccagaaattctttcctcgaaatatggttccacccctccccgcctgctggtattcatcgggagcatgagcctgattttcagagaagagattcaatctttatggggtaaagtacctgccattgtatgcggagccgacccctatgtgtaccatgagaaattctacaggcagagagatacagtcacccccgaagaaaagacacacatgagcgaattggcagaagagttcaatttcacctacatgcacacccccatctatctggaagaaaacgtgcaactgatgtgcaggatgattcccggtatgaagaaactgattttcctgggagacggcatctaccccaatccggaatatgacaagcaactgcgagagctgattaaagacaaatacccgcaaatggattacgaatacatctcctcgcgtaccaacagtctgcatcagctatataacgccgtgcgtaaaacagacaagaccacaggcattctggtatccacctggttcaccgaatcgttcacttcaagcaattttctgattaatgcctacagaagtatcgccagcatctccgcccctttgttcaccatccgctatgcaggtatggatgacggcggcatggtaggaggatacatgtataatgaccaaatctttaccaggcaattactgaaaacgatagacgagatactacatgggaagaaagccagcgacatacctttttatgaacccaacgaagcacaccccgcattcaactacacaagactggtaaataaaggactcgatcccgacctatgccctggtgacaccgttttctatgacaaaccggccaactttctgaacaaatataaatggatcatcctaagtgtactcattgcttttatactgatggccgtggcacagcaaaaacgcatccaaatgctgaaagcgctgagacgcgcccagcaaaatgaaatagacacgaacacacaatataccaatctgatagacaatatgcctatcctttacatgaaagaacaggtaatatgggacaaagaagggaatatcgcagacagcatttatatggatgtcaaccgctatttcgaacgatgtttcttgcccaaatccgaggtgatagggaaaagagcctctgaaattttcccggagtccttgccggaattcacccatttcatggaactcaccttaaaagaaaagaaatcgatcaccttcccatattattttaagaccgtcaacatcttctatgatgttgtcctgaattgctctaccgaaccggacacagtggatgtgttctgcatggacagcaccgaactgcacaatgcgcagcaaatgctgagcgccacgaaccataaactttccatggcactggaagtagccaacatcgtaccttggaaatggaatttgaaagaccataccattttatgcgacctcaaccgccccattgtcatggcggccatgccgggaagcatcagcgaagatcagttgagcgtttcggacgagcaatacttcgctaaaatcattaaagaagaccgcccgcgcgtgatacaggcctaccgtgacctggcagacgggaaaatagagaaagtaaaagaggaataccgcgtgctggccaatgacggaacacaatggaaaatagactggatagaggcgcaggcagctgtggaaagcaaagacgaaaacggaatgccgctcactttggtaggatcttccctagtcataactgaacggaagaaaatggaagacgaactgctttcagccaaggaccgcgcggaagaatccaaccggctgaagtccgcttttcttgccaatatgagccacgaaatacgcactccgctaaatgctatcatcggtttctcaaacatccttgctgctgcagaagaggaacaggaaaagcaggaatatatcaatatcattgaaagtaacaatacgttgctgctgcaattaatcagcgacatactggacttatcgaaaatagaggccggcacactggaattctgttattccaacgtggaactgaatgatattatctccgagatagaaagtgttacccgttatcggacagagagcaacggcattcaactgattgtacagaaaggacttccctcctgcctcataagaacggaaaagaaccgtctgatgcaggtactgaacaatttactgaacaacgccagcaaatttacctcacaaggaagcatcaccttcggctacaaactatgcgacaaagaactttatttctatgttaaagataccggttgcggcattccagccgacaaagtgaactccatattcggacgtttcgtcaaactgaactcttttgtacagggtacaggactggggctatccatttgccagacaattgtagagcacatgggaggacgcatcggtgttgagtccgaggaaggaaaaggatccactttctggttcaccattccataccagcctgccgctgcagagaacaagaaagaggaagagcatcaactcatttccgtgcaaaaagacaagctgaccattctgatcgccgaagacaatgagagcaattaccggctgttccaatctatcttgaaacgagaatataacctggtacatgcctgggatggaaaagaggcggtcaatttgtataagctccatacccctcagataattctgatggatatcaatatgccggtgatggatggctatgaggccacccgggaaatacgaaaactatccttggatgtacctatcattgctgttaccgctttcgcctatgccagtgatgaacaacgggccatggaaaacggcttcgacggctatatggccaagcccatcagcgccccgcaactgagacaacagattgctgccatattacagaaacgcattatcttattataacctccgctttttccattatacccggctgaaatccgatgtagaaaccggtttgaatccgcaactataaacaagaaaacgaccgaaagcgccacaaggatggagaattaaagatgattataacataaatgcagagttaattcatcgcttcagctccattaagtctttttttcagtaccattaaagcatttcttacggttaccttttacagactacgacagtagtccgtatgtttcactacggcagaccgtacagtccactgtagcagactgtacggtccactgccgaagactatagtaacagtccgtacaaaaagacttaacagtccgcatgacaaggcctgatatacccgacaaaaagtattaatcccccatatctaaaaaaagttcccccttgctcaccttcacaggctatgcaagagggagattctacactaactcttaacctaataaataaacgacaaaatcattctttatatctcaaggctccggcaggcagtttctcacctttctcaccaaagctcttcaatgcgttttccggctcaatggttactttactttcatccagcatgttccggtcaaggccgaacacgtctataaagaaatcataaaccgcattgcgcttgttcggaccgaaatcatggcgttcttgcggcaaatgtacattgctcaccttgtccgtcgcaccgtaaaaaccgtagatgcgttgcaagtaaggatattccaaacggggaaccgtggctgtccagtctcctccgtcggaaaccaccagcatgggacgcggggcaaacagggcggccagctccgcattgcaagttcctccacctgccaactggatgggcttgccactttcacacgggcaaccgccatcaaaatgagaggccagactgaccacaggggcggcagctgtaaaacggtcgtccaggacggtaagcaacaccgtctgcgttcctccgccggaaccaccgttcacgccgatgcatgcaggatctatatctttacggtttgccagcatatagtccagtatccatattccgttcatagcctgaatggtgtgcgcatcggcagtatggtgcgcctttcctcctacctgcaaggcggattcaccccaaccatacaggtcataatccacacagacagcccccatacgtgccagagtcgccatgcgctgctgctggtctttgcggtagcgtccctgtccaaaatgaccattggggcagataatcagtgcatgtttgcctttggtgcggggggcatagactgaaccgcagacataaagtcccggcaaggtttccaatgcaaagttctgcacggtatagccatcaaatttgcgtattttggaaagaacaggctttgcatccttcactgttttccccagcatatcatccagtcccagacgttggcgcacctctttgcggagaatctccctgcgctgttcccattgacttttatcactatataaaccactaaggtatgccagcattttttctccgtcggcatccgtgcggcgggcgtattcgtaaggtttcaacttatataccttgtcactttgctttacgaatttataatcgaagggggaaagcacattggtcagcgtttcctccaatgaataaggccggatacggaaatcggcatacggaagcacacgccccaccgtatccacgtcatatttcaagcggacctggaaacgggcggcaacgtcattcaacacatcggataacggacgtgcgaaccgggtttcataagtttgtgcagatgcagcggaaaaagagagtgccgccatgcaccataatagttgtttcttcatcgggaagtctattttatttctttaccatccacatacacatcatccagcaccaagtccttgcagtcttcaaaaacacagcgttgcttggcattctgaatatacacatcacgcatcacaataccggtaataggcgcttcgggaaggcctaccaccataatgggggtattcacatcacggaccgtcacacccgacacatagatattacgaaattccggagtacggtcactcttcggttcggcaggcatcttgctatatttcagattgaggacgatagcctctttcttgatgttactcatcacaatattgcttacacggatatcttctacaatgcctccgcgaccacgggtggatttcagacgaatcccccggtcggttccgtcaaagacacaattgctgatggtcactttcttcactcccccactcatctcgctgccgataactacaccaccgtgtccgctcaacatggtgcaattggtaatcgtgatattctcgcaaggaacgcccagtttacgtgcttgcaggtcacgtccggatttgatggtgatgcagtcgtcgcctaccgaaatgtggcagtcgctgatgtgtacgttcttacaagactcagggttgatgccgtccgtattgggggaaggcacattgtggatggtaatgcctttaatggtcacattatcgcaaaactcaggatttacggtccaaaagggagagttgataatcttcacgccctctacccgtacattcttgcaacggatgggatgtatgaaagggggacggaagaaacgacggtccaatgtgccgtgccagtcttcgttggtttcggcgtaaagggctttcaggtcgttttccttctcgaacatgggctggtacttgttgatgtttctcttgccgttgtcccggaggtctacaaggacgcggaaaaattccgtccaccatgctttgccctgtccgtccagtgtcccttcacccttgatggtgatgttctctgcatccacggcataaatcagcggttggaaacttttcatcatgattccctcatgacgcacttccacataagggaggaagtcgtcaaagttctccgagaatttcaaggtggctcctgcttccagttccagagtgatgttacttttcatgtggatggaaccggtgagataagttcctgcggggaaaaagagggttcctccaccatgggcgttcaggcggtcgatggtggaattaatcaatgctgtgttcagtttcctgccttgcacatcggcacctgcctgctgcatatccacacgctccgcatgcagaaaagacagacagcaaacacatagtaacagacttaaaaaggtacgtttattcatatcgttcattattttattttagttttaccaaataccctcagggggcttttcctatgaaaaccgcgtttatttcttaaaagaataagttccgctttccactatcttcggctctttttcatcgggaaggaatacgcgtgccgtacaccctacaggtatcgttacttttaatgtaaagactccattctcgcgggtccagtctaccgctacttttccgtacaaggtttgggtagaggcacggacgtatgtcaaatcgcctaccggacggggacgtatttctatttccttcattcccggttttccctcaacggtgcggatacccgccagcgagttgaagaaccattcatcaatctgccccatcataaagtgattccacgaagaaccttgccgcgggtcccattgctcggtcagcgtggtagctccgaatttcagctggaaaccatagccgggtgcttcttcatggttgtgcatggtgtacatcagttcattcaacccgttacgcgccaaagtctggaacagataacggttacccacatcaccggtggtcagccggttgccgtggcgttttatatccgctaccagattatcaagcaccgcctgtctgtcatcggcgggaaccattcccaggaacaaaggcaaggcattgctgcactggcttcccgtaccatactgacgagtgtccttgtgataaaactcccgatggaatgcctccttgatttcctcgctcaaacgggtgtaacaggccacatcataccggttgtccagcatacgcgcagcttccgccagatagcgtacaaccatataataatgggcggtagccaccagaggaacaggcgtattacgcgagaaaccggcccggaaatctccataatcataccagtcacccaatccgaaagaaacaattccattatcggcacgggtagtgaggtaatcaatgtaacgacgcattccgttataatattttctgatcaatgaatcatccccatacgtctcataatacatgaagggtaataccacaaaggtacatccccattcgggagattcggcaaaagcatccataccggggccctcgaacaccacatattccggagcagtggtaggaaccgcgccattggcatgctgtgcatcggctatgttctgaagagtctgaggaacaaagcccgtcaaatcataattgtacagtaaaccgggaccgcataaatgatcctgttccagccagcccagtttctcccggtgcggacaatccgtaaacacggactgcatattgcttcgcaccgctttctctatcagccggtgggcatcattgaatatgcggttggagcattcgaaggtggatattttaggagccgagttataaacaaagcacgactgtatcttctggatcaccggaagacggaagggattcttctgccctttcagcacagcgccttccacctgaatataccggaagccatagtaagaaaaacgaggatgccaagtctccactccctcccctttcaaagtatattcataataatgttgtctgccggtctgacgctgattgcaagctccttcgtccgtcagggattcggatacaagcaaggttattttctgccctttctttccacggacggtaatttcggggaaaccggccaggttctgtcccatatccagcacaaaggcagacggggccaccgtccgtttggttgacttgcaggcggctgttatctgttcagcggtgagcttggtcactttccggatatcataacgctccatgatctttaccggttgcgctatctgcggacgaagcacccctttgggggcttcctgaatcacgacaggatgccaatcctgctctttaaaaccgaacatgttccagcctttctgctcacggcgggcgtcataatcttctccgccatagatgcaattgaacagtacgggactgaaatcgtacttccagtcctttccggaaacaatcgtttcactggttccgtcttcataattcaccaccatccgaaaacgaagcgtgggagcgccgaaactgatttgcagtttacgatagcggccgccttgcacattgtaaaatccatttcccagcaggactccgatggcgttaccgcctttcttcacttgcgaggtgacatcataagtattataatagacacttttgtcatagtcgctccaaagaggggcaaattcgctgtctcccactttttctccattcagcgaaaattcataaaagcccaagccacatacatacgccgtggcgtctttcactttctttgccacatggaactcacggcgcagataaatacttttctttgccaaagtatccacagcatcccaggcggcctttgcctcaggctttttcagttcactgccatgatatttccgaccttcgggtatgcgggcatccttacgggtaatggccccaatccattcactgccggcgaaagccgcttcggaagtcaggatactgaaatcagagggggcactccatgccgaaggcgtatcagcctcatcccagacacggacacgccaagtataatgcctgtccttctccaagaccgcatccgcacaggaaaccaactggctttgagcggattttactttgccgctgttccagactacttttcctgcccatacatcccgaatctctatctcataagcggtctgccgcgtgccattttccggcgaactcatctgccatcccaaacgaggggtatcagaggtggtcactcttccgtcgcgcatctcacacgtcaggcgggtaacagttatgtctttcgcctgcacggcgaaagacataactaacaaagcggctattaagaattttctgtaattcatttttctttcaacagtctgtttattatcttaagacatcccctttattcaaatttatagcacattctcacaaaggacacgggtcaatgtatcggcgtgtcccacttcctttccatccacatagatatgcagaccttttccacgctggtaacggctgccgtccttatcccacaaaatagtgaggttacggccatgatacaacacattatccaaacagaaataatcccactttccttcgggaatcaacggattcacctccactgtgttatccatgcgcggacggagccctatcaaaccggtaatcatcaaatcattaaaagtagaatgattgtaataacggctgcgttcctgatctcctttcaaccaataaccggtcacctcatccagatactcgcctatgtaggggcggccacggtgatgctgcgactccacatagcgttccatgtgatggaaatacacgctgtctgtcaatacagtctgaggataattattcatgaaattggccattgcggtcaaagtctgtgcagatgcaaacggccagatagccccatcccattcacacttacctacgccatgcgtgcggaactcaggatgacggcgctcggcagtggtaagtccgtaaggtgcggaaaaacctttctcgtccatcacttccttccatgccacagtgtatttggaagaagcatccggcaaattgaaataccaagggatatagccgatagcctcgcgtacctcggcggacgcatctccacgcatcgtttcaaagaaatgatggtctgtgttccacaacttatcctgtaccaatgttttaatggaatcggctttcaatccatatttcatggccatgccctcatctcctgtcatgatgccgataagagagagtgctttggcattgccatacatataactgttgatagtgggacgggcatattgcttacgacggcctccgctgatggattcttccataccatcctgcacatctccctgccaataaagtccattgggcaggcggtttgtcttttcccaacgggcatattccgcttccaaatcctttaccatatccaacaaaaactccttgtttccatcgaccatgtaacgtcccagtaccgcatccgcattccacgagctaaacttggtcattttggccatcgggcctccttcgttaccccgataccaagtatggataatctgattcaagtattccggattacgcaaccagcggctctcataaatatgatgaccgatggcacaagctatcagattgtatttatcggcatacgaacggtttaccagaaattcggtcataccatagcccaccggagtttccttgatgtgcttgcgcagcgtccaccaacgataataatacatttcctcgaagttcttttgagagcactcgaaaagaggaatgttttcttccatccattgagatgcacgggcattgggaatagcctgggctatattctcatcctccatgctgttgaaataatccacatagggcttgaaatccttatatttcaagaaagccgcaccggcatccttatcagcagaagccgtcttaaagttggctatacgataggtgcacaagggttcctgctcacccgcatccggcagaatgccataccagtccgccggggtatccaccgtaggataagtccgttgcgctccggtccggaacatcactctctcgatggccggaacgggcgcaaagaacatacgttgccccactttctttccatccacatagacaattaccatgcggttggcaacagaaagctccacttctaccttatacgtcttgcccggttcatacttcaacaaattaccaaaccgcgcacctcctttggcacggaaaagtccatcgggagtcagttccagacgggaacaggcaatgccgttttcatccaaaaattctatctgcaaaagtcctttatcgttctgttccgccatcagttcgaaagatactttcagttcttttgtagcaggtatcttacgctccacacgggcataatcgaataagtccttgtcttgcagcaccagccattttccatccagtgatacgggagcccactgcaaggaatacaaattccagtcggtcagttcgctcaaatctttgtagccggcaaaatcgtcgtcagcatgctcgctggcatgtgcgcggacaggcacaggaatatgagacacccacatatcctctttattcatactgtaagtcacccataaatcaccatcgggaggagtcccgttaccttcctgaataccccgtacatactgaggaccgaatgatttataattacctccgtaacgcatcggcgtaatctcgccgtgcaccaggttcaaagtggtatattccaggccgtccttactcagcgaaatagccagtggccagcggaactcggaaggattatacaccgtggcgtatgtaccgtcactcaaacgttgcccccatatcttcgcattactgtttacgaaacctttcgcacgttctaccggttgcgcccatgtatttccgccatcctcgctgatggaagtcagggcgtgtttccacaggcttaccaaacggccgtcgggcaaggtatagtcacaatacgctttgtattctttgtgtaaaggaatcaacgggtcattgcggtcggcttcctccacccactgcatacggtagcggggattatccagaatctcctgacaggcttttacaaactccttgtctttactccgtttaaaataaggataagaggtattcttttcattgaacgcatggttataataaatgaaataaatggggccgaaggaaccgtcctttttaatttcgcgaactacacggcctattccgttcccgtcattcggatcatctttcttgtccagcgccacgccatagtttcccatggctatcagtcggccgctctttgacacataaaagcctacacgctgatgcatgatggcatccagatcttttgccttgtctgtgcgtccgggcttggtatagccatcgggaacccggtagatagggaaaagggtcaccgggtttgtccagtgataaccgtctttcgaggtcatcaggaaagtttgtgagggaggaatatgctcgtccgaaggatcggaaagataatgcatatagaattgtccgttccaataagccaacatggactgatgattgtatgtccatccattgccgttatcgggtgcaggatgttcccggttggcacgcatcacctgaatattgtgtacccctaccacgggtgacaattgcccgtcatgacaggtagggttagacagctccgtgcctgtatagtgtactctatcttgcgccgataccgaaagtgccagcgaacaggctgctgcaaaggtaaaaagttgtttcagttccatttatttacttctatgttgtttttccatttattaaaatgaggtttctcttcagcttgattgacctgcaaacaagcaaagctctacaaaactacgaatttcttcgtttcccgataaaagctccgggctttaaaaaaagacgaaagcacaaagcaaatgtactctataaaataatgctatttataaaaagagtctttttgttaatgaatttgcataaaagaagcttttttactatattagcagcatgaagttaacagtttgataacttttctacgagaaatatgttatttatagtattcactttcttaacaaccgtttgcttatgaaacaaaagaataagatgttatccacccatggcattaaaacactattcgaaacccgattaacccaactcacttcattggcttcagaaagccaggatgaaacagctttcaaaaacaagctgaacgattatctattatccggtcctatttacaatcctgctgccgcaaggcaaattaaaagactgatagataacgatggaaaaaccatttacgaagcctctacagaacaggagattaaaatagaaaccatctcactgctttggaagtttttaacgaatcgtatcatcaatgaagagatttccgttgatttatggattgacctgtatcaccagttcgaccggctttatcacgaagaagaggagctacctgatgaaaaacaagtgcaacagtggatgaaacgctggcccagcggactgaatgaggatgtccgggctatccgccgacaaaacaaagaacgtatcatctcccttcttatccagaaaatagaaaacagacacgcaccctccagccgctacctttttcccgaaggaagcacggaagaggacaaacgccggctggtctgccaatggtggaacgaagcccgttttcatctggcaatggccgtaaaaaaccctaccgaactgaaccggatgctaggcaactccctgtccgaagaaaccttgcagctttatcacaaagcacgcaagaaaggaatgcctgtcttcatcaccccttattatttgtcattattgaatcctaccggaaaaggatatgatgacgaagccatacgcagctatatcttgtactcttcccaattggtagaaacttacggtaacatccacgcatgggaaaaagaagatgcagtagaggacggaaagcccaacgctgccggatggctgctgccggacggacacaacattcaccgccgttatcccgatgtggccattcttatccccgactcgatgggacgtgcctgcggcggcctatgtgcatcctgccagcgcatgtacgactttcaaagtgaacgtctgaacttcaacttcgaggaattgaagccgaaagagagctgggacaagaggttgagaaaactgatggaatatttcgagaacgacactcagctcagggatatcctgattacaggaggcgatgcattgatgagccagaacaagaccctgcgcaatatactgaaagccgtctacaaaatggctgtccgcaaacggaacgcaaacctgcaccgcgccgaaggagagaaatatgcggaactgcaacgagtacgcttgggcagccggctcccggtatatctgcccatgcgaatcaatgacgagctattggaaatcttacgcgagttcaaagaaaaggcatctgccgtaggagtcagccaatttctgattcaaacgcatttccagactccgctggaagtaacacccgaagcgcgtgaagctatccgcaagatactggcagccgggtggactatcaccaaccagttagtatataatgtggctgcttcccgtcgcggacacaccgccaaactgcgcaaagtattgaatgggctgggtgtactatgctattacaccttctcggtaaaaggatttgaggagaattatgccgtattcacaccgaacagccgctccttgcaggagaaagaagaggaaaaggtatggggaaaactctccgcagagcaagaaaaggagtttttgaacctgttgagaaacagtaaagaccgtgcggcagccgtacagcgtttctgcaccttccatcagattcctttcgtagcaacagaccgcaacgtactgaacctgccgggtataggcaagagcatgactttcgtaactatcggtatgacaaaagagggaaaacggatactggaatttgaccatgacccaacccgccagcatagtccgattattcatcagatgaaaaaaatatacatcaaggaaaacaagtctatctggcaatatatgctgcaattgcaggaaatgggcgagaagaaagaagaatatgccagtctgtggaaatatatggaaggagaaacagaacaccgcttccccttatataattatcccgatccgggattccggattacagaaaagtatagtcacttgtcagtagttgataataaatcaatctgctaatttgtcaatgtgacaatgtgctaatgtgccatgtggaacaaagcgtaacccattgacatattagcacattgaccaatcagcagattattcaattcgtaatcttgatccccacaaaatacgttctaggctgtgtaggcccatagaaataacccgagtcacgataaccacctttgtccaaatccttttggaaagcattaaagatattctgcactccaccgttcaattgcaacttgatatggtcattcaatacaaacgtataattcagtttcacattcaaatcaaagaaatcaggagtatgcaccatttcatctttagcgatatattgtcctatatattcctcgggcaactctgtcggtgcgaaatgcggcacatgcatccggcctgtgtacacaccggacaaggagcagtcgaaattcttgaacggagcagatgtcaatgtgaaataaccgtaatagtcaggagtacggggcatccgcttcaccggcgctacctcaggattctcactccatgcctccagctcagtatattcgctgcgctgcaccgtgaagcccacctgtaaagccgcatcacgtccatgtgcaatctttccgtccagattcacgccatacacacgtgccccgttaccgttacgacgctccttcaccttgttaccattctggtcatggcccatatcctccagtacaaacacgtcatccaatccggtatagaatccttccaataacaaattggtctggaaatgaccgatattcgccgtccagtcaatggagccgctgatgctgttagaatgctcaggcttcagcccttccgccaacttgataagcacgccctcacctcctactgccgtaacgtgcaagtcttcatcataagcctgcggcgcacggaaaccggtggaccaagtgatgcgcgcctgtagtttgtcactgggcttatagagcaggttcagacgggggctgaagatgggattgtcaatcaggttatggtcatccagacggaagccggccaggaatacaaactgattcattttccattcgttctgcacaaaagcgctggcaatgcgcacatcctgtttcatatcacggtgataaccggtcataacatcgtgcagggagttgttctgatactccagcccggcggtaaaagtagcaggagagaataaaactttctcaaaattacccacatacatgccgcctgccacccaagtcagatcttttgtctttccgtatgcattcgcatcctgttgcgcaccataataactgttacggtcggtatgctggatggaagaatagaaagaaagcttatgcttgtattctttccaaaacagatcataactcaatccgccactattgataacgtgcttggtctgttcggtgatatccgtttcgtgcggctgcaaatcaaatttattccctccgcggcggaactcattcgtggtatgatattccagactgatacggctgaactgcgtaggacggtaataggtgcgcagcccgaatgtattcatattcagctttcccaactccgagaaaccgtccccgtccgcatcatacggattacggttccgataagactgatacaaagcgatgccatacgtattgtcttttgacaccaaagaggcattggctcccatatactgttcccacaccttgccgttcatattggacattgttgaagaaacctgaaatgaattgttgatggggtctttcgtgatgatattgatggttccgcccactgcattagcaccaaacaaggccgaccctcctccgcggacaacctctacacgctctatcatattcaccggaatctgctccaagccatacacaccggacagagcactgactaccggacggctattgataagaatctgagaataaggtccttccagcccattgatacgcacttgagggaagccgcagttctggcagttgttctccacacgcaaccccgactggtaattcaaggatttagccaaatcggtagaattcaccgattcgaaaagcctggcattcatcacattgactaccaccggagccaccttgcgacttgtttcattgcgattggccgatacgactacctcgtccgtcataatactttcgtcactcatcaaaaaatgaacatctaccgtgaagtcgttactgacggtcactttcttttcctgtgtctcatagcccagtagctgaactctcaatgtgtactttcctgccggaaccttcttgaaacggaactccccgtcctcgttactcaccgtaccttgcccggtttccacaatcaatatggtagcatacggaaggctgttctccgtgcctttttccactacatgacctgaaatcacatttccttccttcacaggatttacatcttctgcatacgcatggatacccgcacccatcaccatgagcacgagtaacagaatatattgtttcatctattttttctattactaaaatgtttcggtttattcaattaaagaatgtgtgcagctctacggcaaaagcacatccgcatctgttgaacggattatccgaatgtatcccgtcaacagatataccttatgtttcagcaataaaaaggaggagcgcgcaaatggatacattgcgcacaaagcactttcgcgcggaaagtatttgtcttgtattccaaaacatacaacacaggacggaatacagtcatctctgtctgccccccgggctccagagtctggatagtgctcagatgagcaattgagattacctgtcctgtggtatgcgtatggtgtttttcggacgaaggatgagagtgcacaatcatcaccccgttcacaatatgaacgtgggtaaacaaagtgatgcttacctgatacgttaaaaacagcgccagcagtaataacggggctactatgtaccttctcttgctcaactatttatttcttttcctcgccaaacaacaattgatagtcttttttcgcggcaggcacagtccattcctccggaataaacttccactggtgcatagcatgaggatgcagcactttttcctgctcaatatattgcatcagataataacgcaaatccttatcggttgcaaaaataatacgttttgccaaatcttccttggaaattccagctccaagagtcagtaaatctccgccaccgttcccacggtaagaattcaaagccactttataaaccttatccatactgaaaggagtcccgtccgacatgctctgaatcgtgattttctctcctgccggcttggtcacgtccaccgtataattaatgcctgcggcagagtcaaagttaaagctgaaattcttgaaattagcacgcttccccttctctaccggctccttgaaaagcatcaggtggtcctcggaactcttcatctgattagtccagatggcgtatgccatttccagaaaatctttaatttccttgcccgaaagttccatcacatacagcatgttctcgtacttgtacaaattgaacatatcactcacatagatgtctccttctttaatctctgcccggaaggacaacggagcacagaaagacacttcagcacccgaaatttccaattgcaactgatgaatcaggtctatgaaaggagaagaaccgaaataagcatccttcgctgtgatggtacgtgaaattgtaccgattttacgggatacaaagtcatttacagccttgtattgaggggcaaacttatccataaactcccggctgacaggatacttgttcatatccgccaatctaccttccaccgacttctccactactttcccgtctttctttgttacggtcagggtcacatccgaaactacattggcattgtttgccgggtcaatgaccagcacactgtctcctgccacattctgcacctttacacattccctagtatggtcgtgccccatcagcaccacatcaaagcccggaacccgtttggctacatccatagaggcatcttccaccacctgtcccaacacgttgcccgactttccggcatgaaacaatcccacaatgacatcaggattctctttttcctttataatcttcacccatttgcgtgcgcagggctccatttcctcaaaatgcagaccactccataatttctccggcaaccatgaaggaatggccggagtaatcatacccagaaccgctatcctcactccgtcgcgctccaacacctcgtagggtttcagataaggttttccagtggcattgtctattatattagcccccagtaccggaaaatcgcactgtcttatccaacggtcgtacaccgcatgccccgtctctacatcatggttacccatattacctaccacatatcccatataattcatcatatccgccgcaacatgagtagacacggtatccataaaattataatagtaagctgtaggctgaccttgcaggatatccccattatccatcaacaggcaattatccccatatttctcacgctgttctttcacaaaggaatgaacacgggcaagacttccactccattctttccgttcgataaagttatacggaaagaaattcccgtgcacatcactggtttctataatcttgataaccacttcttcctgattattggatgcagacaactgcatacctgcccacaacagcagggcactgatacatattctatatttcatttctctattctttattcttttttagtcaaaggatgcgtgaatacaaaccgggcgccttcggtataatccttgtccacccatatcttacctcccagattctcgattatcagcctgctaatggccaatcccagccccgtaccttgggaatattcattcaatttctcgaaacgttcaaataccttttcactcttatcgggcggaataccgcaaccggtatccgacactgacaattccaactgctgatgctgtttgtctatggcaaccgtcagtttgatagaaccggacggagtaaattttgcggcattggacagcaaattaatcaacacctgcttcagacgctgggcatccgtcttgacaaccagcgaaggcacaggagtttcaaacagaaacaaagcactggtcttgcgtccatactccactgtagacaaagccgtctgacacaactctaccacatcacattcttcccatacgaattttatccttccggattccatgcgcgagatgtccagaatatcatttatgaggtgcaacaacaaatcggaattcttctgaatgatatcacaatactgctctttctcggcaggagaggaatcatcactgaccaacacgctggaaaatcccacaatggcattcaagggagtgcgtatttcgtgactcatattggccagaaaagccgtcttcagcctgttggattcctccgctttctccttggctaccagcagttcctcgccggatacttccagattatgtttcaagtggttgatacggataatataatatatggctatcaagaaacaggctatcaggaacatgaacgccgaaacaacccctatgacccaatatttatactgctcataaaacgaaggagtcttgttcaccaacaccgctccctgaggaagattcaatgaatccaatttgaattcatgcaaacgctttatatcaaaagtatattttccgggaatagtcaacaagtccaccccttctctatcccctttatccaaaaaatcataagtaaccgcgcctatattctttcctaccgcatggtactcgggagtatatcctcccaatgcccaatgtcccagccccacagatgcaatagtaaacacaggcagggtgggattcgcatcgcgcagcatataagtcgtattaccaataacataactctccgtacagtctacacgccatgttcccaataacacacacgtattttgaggcaacctgcgcatcctttcactcacttccataaaggtttctgtacggccgtccagccaaattgtttctaaatcggggtacttcttcatctcctttttaaccaaggcttgcatagacaacccgccataggtattatccgatataaatgccacacggcgcatatcaggataaaaacgacgcatcagctttatgtttttatcgacatcatattcatatacataaccggcaacaatattataatcactgaaatccgtataaatattcttactttcaggttcccatacccgcgtgtcgatactatcatcgggcaataccagtccgttgacactgaccatgccacagatagacggagtctttttagctatctctgtgtcttgtgagatataagccgaccatgcctcctgccccaacaatataaccagtgacggacggtttttccccttatacttaccaaggatggaggccatacgcgatttccacagataggcctcggacaaattcttgcagttcatactctctatgatcggagtatacttgccgccacgctgtctgtattcatccataaaagcagacaggttgtcagaaatactacgcgtttcgggattataagaagtgacaataaggataggcccttccgaggtcgtttccgccttcacaggacacagagcaaccacaggaagcagcaggactaatagcataaaaaacctgaatatgattgccaatcccctcatttcctttagaataatttctaaaaattcgctgcaaagataataaaataaaaacagaacacaaccaattggcatgtattttgtttctcttaaagcagatgaaatttaacaaatatataatatggcttacatagactattacaaagtattgggagtggacaaaagcgccacccaagatgatatcaagaaggctttccgtaagctggcccgcaaataccatcctgacttgaatccgaatgatcctggagccaaagataagtttcaggagataaatgaagccaacgaagtactgagtgacccggaaaaacgtaagaaatacgacgaatacggggaacactggaaacatgccgacgaatttgaaaaacaaaagcaacaatatggaggtgctggtggattcggagggtttggcggagccggaagcggattcggtacggacggtaacggcagttactggtattccggcaatggaggagaagaattcaccggtgcacatttcggtggcagcgcaggtggtttctctgatttctttgaagaactgttcgggcatcgtggcggtgcaaacggcggacgaagcgccggattccgtggacaggactataatgctgaattacaactttcattgcgtgaagccgccgaaacacacaaacaagtgcttaatgtaaacggaaagaacatacgtatcactgttccggcaggtatagccaacggacagactatcaaattgcgtggtcatggtgcaccgggggtaaacggtggtcctgcaggcgatctgtacatcacctttgtcattccagacgatcctgtattcaaacgtctgggaaatgatttatatatccatgctccgcttagcctctacaccgccgtactgggtggtgaagaaaccgtggacacactgaacggcaaggtaaaactgaaagtaaaacctgaaacccagaacggaaccaaagtccgtttgaaaggcaaaggctttcctgtttacaaggaagaaggcaaatttggcgatctgatagtaacttataatgtcaccattcctagcaacctgaccgaacatcagaaagagctgttccgccaattaaaagatagtagcaattaaaaaaagagaaggattatgcagaccgatttaattattatcaacgatttttgcgaccgttgccatgtggacccgtcgttcattatggaactggaagaagacggactgatcgaagtccgggtgattgacgaggaacgctacctccccacatcccaactagcggaactggagcgttacacgcatttatattatgacttgtccatcaatattgcaggaatcgacgccattcaccacatgctggaacgtatagaacttctgcaacaggaagtgcgttcattaagaaacgaactggaattctaccgctaaaatccgtgtccggagagggaaagcgaaaactgcacccacttctctttccggcactgttcatttacttttatatttctgtttttaccgttgtttctatacgataagcaggagtgccgaaccgatcatcaccgattctcttctcattattatatataccaagaaaaagtaatgggctgttccgctctttcttcgtttttccatttattttcttacttttttccgctttattatcctacgtttaacctaaaatcactatctttgtagacttaaaagcagccggccggtctgccgctgacgccgtaaggcgaaagaggaaagtccgggcaacgcagagcatcctacttcctaacagaaagccatctgcgaaggtggagtaacgtagaagaaaacaaccgccacaattcctacgggaaacggggtaagggtgagaaggtggggtaagagcctaccagccgcatggtgacatgacgggctgtacgtcttaggagttgtaaggtcatgtaaaccgacattatgagggttgctcgccccacgtcggagggtagaccgctagagcctgttggtgacaacaggcgtagataaatggcaggcacttcgccgcaaggcgaagaacagaacccggcttacaggccggctgcttttttttcatatatcctaatgaagagcttatgagtaccatgaacaaggaaaaactgaaaggtctgcaatcgtttctcaaagatgatatatggcgggtgacagaagacgaggttagcaaatcccgaggaatactctataatgcaataaaaatcgctactctttctgttcgtgaattcactcagggacgtattttgaataaagcatccgcactgacatacagcaccctgctttctattattcccattctggccattttattcgccatcgcacgcggtttcggcttctccaacctgctggaaacccaattccgtagcggtcttgaaggacagagtgcggctgccgaaaccattcttggcctgattgactcctatctggtgcacgccaaaagcggaatttttatcggagtgggtctggtgatgttgttctggaccattctgagcctgacctataacatagaacgtaccttcaattatatatggcaagtgaagaagccccgtacactgtatcgcaaaatgacggattatttctccatcctgctcttactgcccctacttatcgtactttccagcggtcttaccatctttatgtccaccatggtgaaaaacatggaggacttcgtattactggcacccctgatgaaatttctggtacgcctgatccctttcatcctgacttgggccatgtttacgggactgttcgtctttatgcccaatactaaagtgaaactgaagtatgccatcattccgggtatcatcgcaggcacagcctttcaggcttttcaatacttgtatatcggcagtcagatatgggtatcaaggtacaatgcaatctatggtagcttcgccgccattcctatgttcttgttatgggcgcagatttcatggggaatctgcctgtatggcgcagaactttgctatgtggcacagaatcttcgcaactacagtttcagcaaagaaacggcaaatatcagccgccgttatcacgactttctgtgtatcctcatcatgtctctgatatgcaagcgctttgagacggaagaggctccttataccgccgagacactcagcgacgaacataaaatcccgataaggctcaccaagaaaatcctgtatgaactacaggacatgcacatgatttatgaaactgctatggacggtgacgatgaaagcataggctatttgccgtcagtagatatcaaccggatgaacgtggctatgctgctgaacagactggacatagccggaacggaagccttcaaaatagacaaaaagcgatacagcagttcttgggaggcgctggcaaatgcccgtgaagaatattataaaagcaccagcaagatattgctgaaagatttataattctgatattcgattttaccacagattgcacagattcttttttgctcaaaagccgatgcggataattccggatttccacaaagaagtttctttcatcttcaacaatcatctgtgcaacctgcggtaaaagaatcaggagaactgcatcatgcggcttaaatatttgccgatgatatcaaactctatattcacaatgcttcccactttaaaagtatggaaattggtatgttcgtaagtataaggaatgatggcaacctgaaaagtatcctccgtagggttacaaacggtcagactcacaccattcaccgtaaccgagcctttgtccaccgtgatgtagccgcgctttgccatttccttgtcaaacgcatatctgaaagtaaaataccagctcccttcagcatcctttatatccatacattcggcagtctgatccacatgtccttgcacaatatgaccgtccagccgcccgttcatcatcatgctgcgttccacattcactttatctcccactttcagcaagccgatgttggaacgctctatcgtttctttcatggcggtaaccgtgtacgttccatcctgtaaactgactacagtcaggcacacaccgttatgagagatactctggtctattttcagttcgtccacaaacgaacatttcaaggtgaggtgcagattttcctgctcctttacaatacgcaccacctccgcatattcttctacaatccctgagaacataagttttagtctttaattaagtttcgagaacaaagatagaacaaaaaacacaaatattcgaaacttaccgacggttaatgacaaatgaccggcaattcgtcgctaacctgccttttttacatattcagaacaaaaacagagtgcccaattcttttttattatatatttgcactttatactttgcaaacttattaaaaacaaaccatggacagcacaaagattgttggtgaaaaaataaaatcactacgtgaaacaaaagaaatcagtgtggccgaactggccgtacgctctggccttgccgaagaacaaatagaacgaatagagaataatgtagatcttccttcattggctcccctcatcaagatagcccgcgcgttaggggtacgtctgggcacttttctggacgaccaggaagaacaaggagcagtaatctgccggaaacaagagagtgaggatactatcagtttctcgaacaatgcaatggacctgcgtacacatatgcgctaccactcactgtcaaaatcaaaagcggacaggcatatggaaccattcatcgtagacgtggaaccgacggaggaaagccacttctcactctcctcgcatgaaggtgaagagtttatctatgtcatggaaggcgccgtcgaagtatgccacggtaaaaaatgccatctgattaaagccggagacagtatttattatgattctatcgttccgcaccacgtacacggatatcaaggacaagccgccaaaatattggctgttatctatactcctatttgatttatgatggaattaagcacgagaaccttgggtgactggcttgaacattgggccctcaccactcccgataaagaatatatcgtatattccgaccgcaatctgcgcttcacctggaaacaatttaacgagcgtgtagaccacatggccaaaggactgctcgccatcggcgtgaaacggggaacccatgtaggaatctgggcgggtaatgtgcccgactggctgacctttctgtacgcttgcgccaaaatcggcgccgtggccgtaacagtaaataccaactacaaacaggcagaactggaatacctctgccagaactcggacatgcacacgctgtgtatcgtaaacggagaccgtggcaatgacgactatgtaaatatggtctacgccatgctgcccgaactaaagaccagccagcgcggatatctgaagagcaaacgtttcccctgcatgaagaacgtgatttacatcggccccgaaaaataccggggtatgtacaacaccgccgaaattctgcttctgggatgcaacatagacgatgacgagctgctggaagcgaaagcgaaggtgaactgccacgacacggtgaacatgcagtacacttcgggcacgaccggtttccccaaaggagtcatgctcacccattacaacatcagcaacaacggtttcctgacgggtgagcacatgaaattcacttccgatgacaaactatgtgtctgtgtacccctgttccattgcttcggagtggtattagccaccatgaactgccttacacacggatgcacgcaggtgatggtggaacgttttgacccgctgctggtacttgcctccgtccacaaggaacgctgcacggccttgtacggggttcctaccatgttcattgccgagctgaaccatcccatgtttgatatgttcgatatgtccagtctgcgcaccggcattatggcaggctcactctgtccggtggaactgatgaaacgtgtggaagagaaaatgtttatgaaggtcaccagtgtatacgggcttacagaagcttctcccggcatgacagcctcccgcatcgacgattcgtttgatgtacgctgcaacacggtgggccgtgatttcgagtttacggaagtaaaagtgatcgatccggaaactggcgaggaatgtcccataggcgtacaaggcgagatgtgcaacaaagggtataacaccatgaaggggtattacaaaaaccccgaagcaaccgccgaagtgatagaccggaacggctttctccactcaggagatctgggagtgaaagacgaagaaggtaattatcgtatcacaggacggataaaagacatgattatccgtggcggagagaatatctatccacgggaaatagaagagttcctgtatcagatggaaggaataaaagatgtacaggtagccggtatcccctccaagaaatacggagaagcggtaggcgcattcattatcttgcacgaaggggtggaaatgaacgaattcgatatacgtgacttttgcgacggcaagatagcccgttacaaaattcctaaatatatcttctttgttgatgagttccccatgacgggcagcggaaagatacagaaattcaagttaaaggatgtgggattggagttatgccggaagcaaggcatcgagattatttaattcagcctgcctcttgcattaaaaatgcagaattaagttacacagtcacggagaggaatacattgcacggattcttctctgtggttctgtatcggatatcggaaccggacagcagatgtactcctcacgttactccataaaaaaaggagcaacgccttgctccaaccttttgttaaccttaaatctaatactatgaaaaacacacatgcaaatatacacactttcctgctatctgcaaatttaaagaagcgttaagaagaaattatagtattgtttaacaaaagcaacaactcctttaacatttcaagttaaagtgaatggtttcttttaacaaaacaaaaaggctgtcccgtaaggaacaacctttctatattttttatagtagacgcttctacttcagatgcaactacttctctcaagccgattgcaatcttcaacctttaatctaatactatgaaaaacacatttatataacacggcggcaacaagaattgttcaaccgcaagtcattaataaatgtttaaatccctaactataccttttcttcctttggcaagaccgaatgccaaggaattccgtctacagtagaaaggtccttgccagactctatcaaaccactgattacataatctctggcagtaggattctggaacggatacaatccaaactcgggaagaacagaaacaaaatgttccatgatttccgcttggatagattcataactaggccagttcttattggacgagaaacaataaatttgtacgggcaggccattctccgtaggagccaatgtgcgcaccatcagcaacaggtccttactgataaaaggatggcgcttcagatagagagtcatataagcacgaagcagccctacattcgtatcgatggttccatttaccaatccggccggattgtcagtattcgctacttttccttcagccgcctgtttctgcttttctgtgataaagtcggccaaatcagcatcaaacttcttcattttctccaaaaattcaggagtacagggttgtatgtaatccagtttcaatgcatactcgcgcataatacgccgcccgcccgattcagtcattccacgccaattgataaatgaaccggagactaatgaataaggaggtatagtgacaatcgtattatcgaaattctgaaccttcacaatgttcagagtgatatccatcaccaccccattcacattattctgcggcatctcaatccaatcgccgatatgcaccatatcattctcggaaagcagtacccccgccacaaagccaaggatggtatctttgaaaatcaacatcagtacggcagcaaaagcacccagtccggtaatcaggttgagaggcgacttattaatcaatatggaaatgatgacaatgatggcaacacacgaaaaaatcacttgaaagatctgtatgaaacctttcatcggacgattctgtaactgctccttgttcatcagcacattacctaccgagtttaacacggcattgaccgaaaacaacaaagcgataaagaaataaatccaagtgattttttcactgacagtaaaccaagtagaacgataatcgaacgcaaacggcaacaaagcggatataataagcggcggaatgaccgcagacattttccgcaaggcattgtattctatcagcgaacttaaaaaactgatatttttatatttcaacaccttccgtgtgaaacgcacagataaataatgaaaaacagctcctacagcaaaagcaataaccacaatcaggatcaagaaaataatctcatccagttcattcaacctatcgcgcgggatgcctatccatgatagaaaactcttaatccaagtcaataaaattcgggcaaattcgtttgtactcataattatcgtctttttacttatagaaccatctataaaaacatttgtttagctgagggatgaaaaatcctcccccagcctgtccggaaacggtttcctgctttccttttactctgtcattccagcgtaacgactctttcaaggaatcggcgaagtaaaccaagaagtcaaacaaatctatttatcgaatataccatctttcgcactggctgtagacggcaccccaacataacctcccaattacaattagaaaccccaattgtcttcgtattcgagaaaccaagacctatccctgctttatccacatccacgttatcaaaagtcacgttataaataggcttctcctctgtgccttgaagcaccaatgcagctacattcacctttttgcatttcaaatcctttacataaatatcatgcacctcagtaaaataatggttatccatcccctcgcctgcatacatggaagttacgcgtacaaaaagggttaacatgactttttaaccggttcaatctttccgctgccatgaagcccaaagggcggagaaactgagaaaaagtaatagcccgccagcggaattaaacaacaatgtattgcatctgttcctgttgcataaaccttttctctttccagattaaacctttttatacggatgtattctatctccatagcctttggagttatctccataagctttggagttatctcccaaggctatggagttaactccaaaggcttgcggagatagaacaaacaggaagaaaacccttaactatccaacgggaaaggtttatagatatggacaagatcttttccattgccccgcttatagataaatcctttttaaatatttccataaaaaaaagctgtaccctcagaagatacagctttttttatgtgattccgttgcgattcgaacgcaagacccacgccttagaagggcgttgctctatccagctgagctacggaaccatccttaattgcgagtgcaaaggtacggtttttattgaaattaccaaaagaatccgcaacttttttgcattaacaatctattttttttctattcaacatccaagcaaaaggtaaatagcaacaaatatggaaagcgtaagacactatatatgaatctattccaacccattccaccaaattcgtatacatcaatgaagaaaaaaactgaactataaaaaaaagcgccacaaagtaatcggcaaaacgagaaaagagacaggacataccttttattatatccttatcatcccgaaaacgtcccgatgcataaccgaaagccatacccgacaatcccacaccaaacgaaatgagataataaatccctttttgaaacggagagttcgtgagagatcccgtcacgctacgcaacatagtccatggagcaaaagtggtgcaaataatcattatgatataaacaagcagtatacaacctgccaatatcaacgcacgtttttccttacgggaaatgggctttcctcttttcactatcctccccaacgtaccccataccccggaatgaaccgtaatgccgaaccctaaaaaaagcatcattactatgcccaatgccggtgtctggacaaaattccccatagcatgcctcaattcccaccggattccttcgggactgagcaggctttgcaccttccccagcccataaatacttcctatccatgagaacaaggctacagctaccgtcagcagaaaaaacacagtagcggtatgaggaaaataatatttactcttcatccggttccaaattatcaatgtcaagaatccgcaactcgaaagcacgggtcaccaatcgacaggcattgacaccacttctttcatccaatgtgaacaaacggtttatcaattcattctgacgcttctctatggatttgaccccgaaaggcatccctttcagattagtaatcatttctttggtataccccaaggccagatggcgaagcaaacgctcatcatattcatcaatatcataattaatgacagcttcctgcctgcgctgctcctgagccaccgactgcttgaaacgtgccactattttctccagaatgggataattgaaaaccagtttcttgccatccatcaccgcctgtacatctgtggcagtcagcaactctcccgtcttcaggattataccatccgcacccgcattcagcgcatccacccataacttttcgttcaatacctcaccagtaaaaatcagcaccttcatatccggatagttcttccgtaaagaagaacagatttccacaccgatggtagtcgatccccccaagcccaagtccaataaaaccatatcgggcaactgcactttcagcaattcccaaaactcattctcagtcatagccgttccgatgacttccgcattcggaatttcgtgtctgaatatctcttccgttccttttaattccagtttgacatcctctacaatgatgactttaaatctattattctccataatatgcattgtttttttacattctacattcaacgggcaggcagggtgaaccatacggtgaaccctccttcagcggcaggctgcgcattgatacggcaaccgcgtcttccggcaaattcatcatggtcacgaatcacctgcttacaaataaggtattccgtaccggtcagaactccttcctgcccctgcttcatacgagacagatgcgggtagaacaacaagttcaactcctcctgcgacttttcgcgacgcgtatcgcggaaatcaaaccgcacaaaatccttatccttataaatacacaattccaaaacaccatccacctcgtatgatagcgcttcatctattaaattctccaacataaacttcagctgaatgacatctcccagtacggaaacatgttccacctccgtcctcagttctacccgatgcggcatacgttttccagcacgttttatataccgtaccgcataatcggccagttcgccggctttcacaacacctctgcggaaagtaatttcttccaactgacgtgcggcgcatgaactcagcaaagtaaatatatccttataataactgatcaactcaccaatcgtttctacttgcacagcttcgttttctccagcctgacgggtgttcaacctgtcgataatctgttttatccggttaggataataaattgtctcatgcttaatggttgacaagcaattgtccaataccagattttgcacatgcaactggttttcctcccgtatggctcggcgcgcatcatcctgcgcactttctatatcccgatatttctgcgccatcagtaccactgcattatatacaatgatggctacatatccggccacaagctccagcatcaagcggtcgtcctcacgctccacaggcaaagcgattttcaatgccagcacacccgtgcaacgattctcgttacctgcttccacccacaagggcaaacattttaccctatctttctcacgccaataaggtgtcttcgcgtcaaaactacgagccatcatctcacgcatttcttcattctcatcctccaccggtgaaaaagcataattcaagctgtggttgtcttcactataaaccgctacgcccaacacatcaacgggcagcaactcatttaccgtttcaaacatatccttgaccagacttgcagcaatatcccggtcggctcttccgtcaagcaaagaggccgaaaacacctgcttgttgatttccaacacctgttccaagttataacgataaatcaaacggtggcggaaatacagaatataatatcccaccagcaataccaacaaaataaccacacaaagaatgatagccaccgtcttattattggcagaaagctgcatctggcggcaatattgctccaatgaggtgtcctcactgatctgtttgtacagcgccgtataagcattattgttataacgataagcctccagattacctaaagccaaaaaggcgactgctgcctcgttgcgaacatccagcaaggcatagtaatcggtatcaaaatgccggttgaaccaatctaaatccgctgctaccccctctccttccaattccaacaaaggccctttgctgcccgaatacataatataatgcttattcaaacaatatagagcactgtccgcataacacaatgcctgttgatataatccatcaatgttacaattgtaaacatcgtatgcatattcattcgcaacagccaataatttatcatatcgctgaatggaatcattgacagtgagctgttcagctttcccatctttctccctcccctcattacatcctgccaggacaggaagaaaagcgaccaacaccaacatcaacgttttgcgcactcctttgggcaaacggaaatagaaacggctgcctttccccaattcactttctatccggaacaggcagacccggaatatctcattggtcttcttatatttatcaataatgcctttgcaattcatcaaaccgaaaccgtgacctttattcttctgcaattcgctgacattttcgctggtctgcaatccgattttacccgaatcataaactttctcactcagaatacgctccacatcttcctgtgaaagtcccggaccgtcatctttcaccgaaatctccacgtaagattccgtttcctgcgcataaacagaaacatttcctcccggctgcgtatatttacgggcgttttccgtcaatgtatttatcatgaaaagcgtcagagccttatccgctttcacaatggcggcagtcggctctatggtcagagtctgttgtttcatctcgaaagtcttacgcccttttaccagtacatcaaaaagggaattcaactcaaaattctctatattcaaactcagtgtcccctgccgcatcttaatccataaggccaaaatatcattatactcattgatacgggtaatcagttcgtcgatataacggtatttgctttcttttatttcttcgttctgaatgtagttgtgtgcggttagtttatgcacttcattcatgattcggtctatataaggcataatgcctgtgacaataaacagacaggctttcttcaccagattctgccgtttattctccgccaaatgctgttcatggacatattgctccttttccagccgtttccgttcatcgcccaacgaaataaaagccagtccattctccagtgtccacgaaatgtaaggtgtaatgaccctcatcagtgctttatcatctttcttcattttgtgctccgaatacaggtgcacctcgcccaaaggttgttccctgcccggaatattcaagataaaacttgtacaaatcccttgccccggcacctcattcccctctccattttcagccacaatacggaagtccgtcgctcccaccaacgaaaggatatcctctttcaccgaggcaactaccgcttttgtcacatcctctatctcccccgcatcaatgggtacggaagccgttatcttacggcatatttccaaagtacgtttcaacttatcaatataaagagcattccgcacacgccatcttttattcaatatccaaaatagaatgataaggacaacgataccaatcaccactaccaccagaagtccgttcaaggcttccgattccttctccaacgcattataacgactctccaattctttgtcctggcgggtgtagtccaaaatatccagataaatattacgattataatccgactggggtttcattcctaacgctgcatatgttacactcaattgttcacggaaacgggcaatccattcgggaacactttttataccatcgtcattaatccattccagttcaatggaagtggtagccatgggaacatacggacgtagcctgtccatggtatccgtacaatggtaatatttctcgtgatgccgattgacgtaccccaatgcttccgacaagtaatgcagcgcgtcttcatacctgccttgctcgttgctgcacgacgccaaagtgcggtatgtacccgaaatctgatacaaatctccatattttttgaacaaatccaaagcctgccaggcaaaacgcatggtcaattcctcccacgacaagtcctcgctattgatggcacgcatcacattgggacgcctttccattatcaaatcgaaatttttcctctctttcagcaattctgccattgcctgagatgcattcgcctcgaaatagacatacccgtattccctgctgatacccagacattctatcagatagttaaactcacccaataccacatcctgcggtgtatccgcttcatacataccgccagaccctttcatataataataatagagcaattgggcagtatcactttccagcgcctcgtctacttttatttcattaatcgcctccaaagactgctgttcctgctgcaaataatagtaatagatggcagaagcaatgaaaaactcggaacgggcataattaagccgctccagctctccgggatcggttatagcagaacgatcatcactgatacgcttcatacgccgtaacgcactgttacgataatcatagaactccttgttcatggcggtacgctgacaaattttcatcataccgatatctgctatcaaacattccaattcattgtttgattcctcatatacgcgaagaaaaagatcttcggctttttcaaagtccatgtggataaaggcgcagaaaccctgattattcaatgccccggcacgcagggaggggaatccatccgccagtttgtaggcgtcatgcgccgctttacacgctgtgtccaaatttttatagcgcatacgataagaaagcaagttcaaagaatccgcctgacggtatatagccatatccttcttcttttcacaagaaaagaaagtccctgctataatcaataaaaccgcccatacaggcaatagacacatattcttcataaacatcccttctcctttaggttaaccacccaccaataaaaatacaaaaatatcaattatcccccgaaataaaagcaaaacctggtagaaaataagaaagccaccccgaaggatggcttataaaaatctttaaaagacgaatgaaggattatttagaagcttccaaagatgcttttctaaattctttcatcagtttttccaattccaatgatgctttacgtgcgcgtgttcctgcagctttgttacctttttcaatctgcaatgctgcatcagacataaaagcttcgttcaattctttgattttagcaattaattcgttcatgttcttttttttataaattataaaacggttcaaattaaattcttttttggcaataaatctcctatccatctctttttttacgatttttcaacagttgatcctcgtttacagggtatttcaatccataacaggcaatattaaaacgccctcttgaatttacaaacgattatcagctgaaaatataaacaatcactccggttatcaacacatacgccaatgcatatggaatggcggattttaggatttctccttcttttccctgttggtttccggcagaagtggcaatagcgatactttgcggagaaattatttttccacctgtcgcccccaccgtattggctgccgacaaccagtcgggacttacttgaatatgcccggccacattagcctgtaatttgccgaacaaaatatttgaagaagtgtcactgcccgtaataaaggtacccaggcaacctataacaggggcaaacaacggataaagacttcctgtagcaactgccaaagcagtggctataactgaaatcatacctgccgtatccatgatagtggacaaactcaccagacaaattaccgtgataaaagttttctttaactgctttaccgtattccagagtacagcaaacagctcccatatcttggctccctgtatcagcccgccgacaaacgtgcctacaaaaagtaaaactcccgcatgggtcagccaagaaaccgtataattcatagttgaatcattaatcggaagactgatacgggtcacccaattattttcaagtgttgtacgtaaaccgggaaacaacggactagtcagaacaatcaagaacaagataagaagatagatactccacgcgttcagtacctctagccctttcaatgtgcttttccttgctttttcctctttagaagcagtcagtttgccataggctacaataacaatgatagataaaatacttccaataatagccggagactccgcccccatatagcgggcggcaatatactggctgcctaatgagacaccaccgaccaacaaagacaggaaaatatttttaggtaaggattttaatttcgaatcggtcaggaacagcaatacgaaaggaatgagaaacatcagtaccgaaagctgcaacacgacattggcgcttagcaccaatacatccagattcgtttctttcgccaataccaagaccggtgtaccaatagccccaaaagcagtagccacactattggcaatcaaactgactgttgccgaaaagaccggtttgaatccgagactgacaagaatcgccgccggtatagccactgccgtaccaaatcctgccatagcttcaagcaagccgccaaatccccatgtcaacagcaatacctgaatacttttatcggtagaaatagaagaaaactgttgcttgataatctccattttttcagtcttcaataaaacattatagctgaatatcgccatcaaaataataatcagaataggagaaacagctttcaatgcaccatacagaaaagaagacagcaaatcgtttaccggaaaatgaaagccgaaaaaagcaatcagcatagtaacgacaagggaaatcacactacttttgtcaccggacattttaaaaaacgccatcaggataattaatagcaataccggaataatagcaaggactagattcataaccattgtatttaagttaaagaaacggtatccataaactcttaaattaagcctttgaaaccccacttccgcaaaaattctttttttaataacaaaaaagaatcctatttggattaatgatctatccttttttatcagtaaaaataaagtaatgccagaagcatgtataatgtatctttacacaaacctccggcatacacttcttatccatatattgattttatattgtagtaatattccttattctattaatatatcttattaaattccagctaatgcctgatccaaatcggccagcaaatcatctatatgttccgtacctattgataaacgcactgtccccggataaataccctgttccgccaattcttccgcattcaactgggagtgagtggtactggcaggatggataaccaatgacttcacatcggcgacattggccaataaagaaaagatttccaaactatcgatgaaacgatgtgcttcttcctgaccacctttcacttcgatagtgaaaatagaactagctccattggggaaataacgctgatacagagcatggtcaggatgttccggcaaggaagggtgatttactttcttgatcttcggatgatttttcaaatgctccaccactttcaacgcattctctacatgacgttccacacgcaatgaaagtgtctccaatccctgcaacagaataaaagcattaaacggactgatagttgcaccggtatcacgcaataaaatagcacgaatacggacagcataagcagccggacctgccgcctctacaaaacgcaccccatgatagcaaggatccggttctgtcagttgagggaatttacctgatgccacccagtcaaatttacctgaatcaacaatcacgccacccagtgaagttccatggccaccaataaattttgtagcggaatgtaccacaatatctgctccgtgctcgatgggacgaatcagataaggagtaccaaaagtgttatcaataatcaaaggtatgtgatggcgatgtgctatttccgccacagcctctatatctataatattcgaattaggattccccaaagtctcgataaacaccgcctttgtattctcctgaatagctttctcaaaattagaaagatcaccagggtccacaaatgtagcagtcacaccataagtcggcaacgtatgcgccagcaggttataagtacctccgtaaatagtctttgcagctacaacatgatcacctgcacgagtaatgttctgaaacgcataagtaatggcagcagccccggaagctaccgcaagtcctgccactcccccttccaatgcagccacacgttgttcaaaaacaccttgtgtggaattagtcagacgcccataaatattacccggatcttgtaaaccaaaacgtgcggctgcatgtgccgagttatgaaatacataagatgtagtctgataaataggaactgcacgagcatccgtagccgggtctggctgttcctgtcctacgtgaagttgtaatgtttcgaaatgtaatttttttgtagccataatctttatctttttaaagttatatatttctgtttttacctgttgcaaaggtattaaaggcagttatatcaaacaagatatactaaaaataaagaaaatagagctacaattatcactatttatagaacaaatattctatttacaaacggattattacctcctggaagaaaattattctttggcgacatctaacaaaataaagtgacggccgattcacatcgaccgccaccagacaattaatacacacaatacgattaatacaaaaaatcactcatgatcatgttccgtttcagtacctccatccgcactcaagacaatattacgagccacttctgtctgattgcccgccgcatcggtacaccataccatcagatgataatctccgggagcagcatcggccggaataacaatatcatgatgatgtacttttgtattcttcaaaccggaaacatcatataccttgtcaaaagtaaaagctgtgtttttctctccggctgcccgggaatcatgtccgtggtggtcaaaattattatgaatattgattttatacgatctcaacatcacatcatctgacagattcatttcaaaatgtacccctttcccattaccaattttcaacaccgctccctcttcgggttctatcaaatcgatcacgggctttgttacatcccctttttcatcattatcacacgcaggcagacaaacagagcatatagccaaaaagctgattacaagaaaataaaattttgttttcattttaataattgtttaaatggtactttaatcgaaatctgaaagcttcttcccggttcagggatttccactttcctataaaaactcaaatgattgtaatatttcacatccgacaaattacgaatgcccaaagatatttcaatatccgccttggccataggtatatgaatacttccacccagatgaatcaaacaagctccgggtgtgcggtcttcattcctcgctatacggttctgcgaagctatactttgaagttcagcatacaactgaaaatcctttttattccatgtcagaatattacgcatggatacaggaggtgaaaaacttaaagccgtatgttcgtcacgattataagtatagacatactcaccgactaaacgataattaaaatggcgtagaaaatccatattgaaatttatctcaccacccatgaacaaagcacgtgcgccactatattgataaatctgtccagcatggggcaatacagaccattctcccatagggcgcaaataaatataattatcaaaccaactggcaaaagatgaaacaaccagttccatttttttataagccaaggtataggaagcatcaatctgccatccttgttccgaagaaagagtggcatcccctttttcatgacggaaagttccgtgatgcactccgttggatgctaattcattgactcccggcaaacggaagctacgtcccacattcatcttcagaagatgaccggcagcgggtgtccacactactcccgccgaacaggaataattaccataagccctgtccaccggataacttcgccaacgatatgcctgtattacctcttcttcatatccctgtctgtgcagatactccaccaaataaggatcttcgaatgccgctatatcaatccttccccgatcataacgtatcccaccagttacagacaactgattatccaatcggaaagtcgtcagccaaaaagctccggtagtaaaacgcttgtattccggtagcagaaaagaatatccgccaatcgcatttttctgtatctgcatattccaccctgccatatgctcccaggaagaagagctggacaaccgcagcttcagagaggagctgaatgtatgcagtttgaacaccagttccctatccggatcctttgcaggcatcatctgagtgtcataatgggtatggaaagcactccattcctcccgatgattgaactgatagccgaaatcacctgaaagttgtatcccattccaaagatactgttgatgcgtggttactttaagatggttcactttgctataaggcaattcaatattacggctgttctcatcatcctccaaacgggaaatatcaggaatgccatgagcaccgagaaagaagcccatcttctgataaacattgctcacagcaatattcatctgataaaacttctttctataatctcccatgacagaaacattgcgctcgaacccagcggtgtttttcagcttacgaccgtaaacaggcaccaactgggtaagatatacaatggtatcgaccggtacatgataatctccatagtgctgttctgaaaaacgtactctgaccagccatgcattcttctcaatacctagcatcagtgaaccgcccacagtgccgttcactgattttcccaataaggcagcctcaccaaaaaatcggttctctttttgtggaagcaaaggaaggatttcgatgacacctcccatcgcatcactgccgtagagcagtgaagacggacctttcagaatccgtacctcgtctacattaaaagcatcaatttccagtccatggtcggccccccattgttgcccctcttgttttattccattttcggatacggcaatacggttgaatcccaaaccacgaatcataggtttggagaatcccgcaccaatatccatcgagtgtacaccgggaacatttttcaaagtctgtaccaaattaccggtaaaatgccggttcaaataatctttctgaaacaactcgagtgtcagggtagtctttttctcctgagcatgtcggtaagatccagtcaccaccacttcggataaatccacacttttaatcgtatcagaaactacctgtgcatttgaaaacaaggtaaaaaacattcccagcgtacccgaaacatatctgatacgcataaattacaatcatttgatgttgtgaataaataaaagatactatgtgaatcagcaaacgggaggtgcacgcagataataaggataagatttaacctggcaaaccttatccactgttattttcggctgataatcaaaaaccggaagaacaatatgaagttgtaatgtttcaacttgtgtaaaaggtgaaagtgtgaaattgcacacgggacactgatgagaggaatcatgagaattcccactatcagaatggcaaacggcatcttcttcatggtggtgaaaagtcttcaccatgaaaaatggcataagcgtcattaacaacagccatgctataaaaatcctgccttttgcgttttctctcatttttgtgttcagtaagaccactacaaaaatagaaacaaataacaaactcacaataacattttatatttattattagtttcatccactttttacctacaaatgggtatgtatacaaaaccgaggtaacttcccagtcacctcggtcacgacagatctttattttctagaacagcctacaatccggtcattctaaaaaagagtaaccactccgtaaataacagcggccaatattccactgacaggaatagtcaacacccaagccgtcatcaggcttcttgttattccccatcggacggctgaaagacgcttagtagcacccactccgataatagctcctgtaatggtgtgggttgtacttacaggtattttcaaatattctgtcagatacaatgtaaatgcgccagcagtttccgcaacaactccctccaaaggagttactttggtaatcttagttcccatggttttcacaatcttccatccgcctgacatcgttcctaaagaaatggcagtaaaacaagaaaatgccacccaatccggcaaatcattgatactatttattcccattcttaacccttccgaatgagcagcgatcagggcagcagcaataatacccattaccttctgggaatcattcagtccatgccctatactgaacaaagccgaagaaacaagctgcaatttcttaaaccacatctcagccgtattcggatgtgcacgacgacaaatgtgaaggacaagcaacgtaaatccaaaagcaacaaccatccctataaatggtgccaaaaagataaaaacagcaatcttcaaaataatattgagctgaatggcatcaaaaccatgagccataatagcagcaccggcaaaacctccgatcagcgtatgcgaagaagaagaaggaatccccttccaccatgtaaacagattccagacaatagctgcaataacccccgaaagaataatcggcaaggaaatatactgttccactactgtcttggatacagtattggctattccgaaccctccgattatacatttagcaataaagaatgcaacaaaattaaaaaatgccgcccatatcaccgcttggaacggagtaagaaccttggttgacacaatggtggctattgaattggctgcatcatgaaatccgttaatatagtcaaaaatcaaagccaaagtaataataatcactaataattccatattgtaccttctgcttttatgcgtatttcacaatcaggtttctcaagatttttcctacccgttctgccgcatcggtcgttttctccaattcatgcattatctccttgatcttaatcagttctatgcaatccttttcttcctcaaatagtttcttaacaaagagttcatatacatcatccgcctgattctctatgtcatgcaattttgtacaacatactcttaattcagtaggctttttacggaaaatttccaattcgtccattgccttacttatataaacagccgcttgctgtatcaacaaactcaactcttttccactattagcaatgggatggggattatagatcgtgatacgtttggcgcaactgttaatcccatctattacatcatccatagttgatgccaaatcgtgaatatcctcacgatcaaaaggggttatgaaagtttttcccaattcgtcaaaaattaaatgagtctgcttgtcaccttcacgttccatatctttgatgcgtttgtaatagtcttctctctcttccggcttatcatgctgcatgctttctaccaataaatccgatgatgaggtcaggatttcagacaaacgtttcaacatagggaaaaacttaggttcttgaggtgtaaatcgactaaaaaaagaatttttcataaatgtaatttgaataaattgtttttgatatgtttgattttagtaatggcgagttttccacttattcctgcctacttctataacggcaggcaatatagaaacgacaataatagccacaatcagcaatttcagatttttctgtacaaatggaagatcaccgaaaaaataaccggcataacagaaaataccaacccacaaagctccccctatcagattatacaccataaaataataataatgcattttgcccatacctgctacaaaaggagcaaatgtacggactataggtacaaaacgggcaataatgatggtctttcctccgtattttttataaaattcatgtgttttttccaaatgactttgcttaaatatacgggaatcgggattattgaaaagtttatttccaaaaaagtgtcctatcatataattacaggaatcgcccagcacagctgaaagaaataaaaccaaagcgagaatattaacttccaaaggcatatcgggcaaagccgaaatagctcccgcgacaaaaagcaaagaatctccggggaggaatggagtgacaaccaatcccgtttcgcaaaaaatgattataaacagtatgacataagcccaagtatgatattcttgaacaatatctatcatatattggtcaatgtgaagtataaagtccaataaaaattccattatatattagttattaacatataacaccgttcataaaaggaacaagcatccaccccagttcccattatgaaaatataaaaacaaaaaaatgtaagatataaaaaacagaccttgccgagaagaaaaaataaactaaataagaatacgcctcaactgataaatatagtattcacaggaatattgagtaaaataaagaataggtgaaaaagaaatttgcttttcttcaggaagaagtactttcaagaatctggccaacttggctatgacggaagcagaggaatgagttcgcagaattttagaagagcacaaggtgcgaaaagaaaaagaggtagctgtaccgccgataccgactttataaaaatggtagctttcattatttatctcttttttttcctgcccgttattgctttcagatatgttgcacagcgccaccgcactgttttccaaaccaactgtacgaactacatcgtgctcctgtccgctatcaaatgcggaaccaaagcccgccaacaggcatacacctaacaagatataaaaaagatatatatactttgtcatagcaactgcaaagataaaaagtatttttgagagataaaatcattctgcccttttcttgcattctccggcaaaaaaagaatataaccctgtactacatttcccgaaaattctccggaatctaaaataaatgcaatatatttgtattaacagatatgaacctcttgaaaaaatattattctatgagtactttagagaaacttgacaaagtagatttgcagatactacgtaccttgcaagaaaatgcccgactgaccaccaaagaactggctgcacgggtaagcctttcctccactccggtgttcgaacgcctcaaacgattggaaaatggaggatatataaaaaaatatatcgctgtattggacgctgagaaactaaaccaaggcttcgtggtattttgcagtgtcaagctaagaagactgaaccgggacattgctgcggaatttacacggataattcaggatatccctgaagtaacagagtgctacaacatatcaggcagttatgactatttgcttaaaatacactcccctaatatgaagtattatcaggaatttatcctcaatgtcttgggcacgattgacagtttgggttcactggaaagcacctttgtaatgaatgaagtaaaacatgaatatgggattcacatttaagtaaatcccatccatcctctctcatcaataccattttttacgcttaaaatagaagtagataactgctactagtatcaacatcaatgtccatgcaaatacatagccataccgccatcccagttcaggcatccattggaaattcattccccagattcctgccagaaaagtcaacggaataaatatagtagaaacaacagtcagctgtttcatgatgctgttcatccgtcggtcattattggaaaggtaaatatctaccaaagctgaaatcatgtcacggcaaccatctaaagtttgcaatacaaactgcaaatgatcattgacatcattaaagaaaggacggcttgctttgtgcaacaaatcattatcgatcggatgcaacaacttgctgatttcctcctttaatggtaaaatacatttctttattacacgaaaattacggcggtattgctgtatattttcaataccgagcatatcagcctgttccggcgaaagcaattgctcttctaaatcctctaatccgtcttccaattccgaaataatggatataaagctggccatcacactgtttagaataacactgagcaggaaatcagactgccggctacgtattttcaacacattcttttccaatgccgtatttatatcattcagaaagtctgtttccttttccataaaagtcaacagataatttccaccttgcacaatggctatttgttgtggtacatagccatcatcattagaaaaaagtaacttcaaaatcactacattatatgtatcatgctgttctatcttggtctgatggtcggagttcaaaatatcttgtatcgtcaaaaagtcgacattaaaattctgacagacatgctgtatgacctccgtattctgaaagccatgaatttgtatccagtttatagcattcttattcaaataagggattaaactatctatatctttcccatccttcatacaaatactttcagcattataactgcacaaatgcagatgcgtaggggtacaactgacaccaatataagcaagttgctcacttagtaaattattcttcgccatagtttcagtaatgaatagtacaaatataattcttttttaaaagttcaaccgtgttctctacaaaaaagaaaagattcccccaagttttcaaactgatccataccttttcaaaccatagtacgaccatcataaattattttgaagaacgattaacaaatgcttcagcggagtcgttcaatgctaaaatcaaagcttttcgaagccagttaagaggggtggctgatctgaagttcttcatgttcagactggctaggctatacgcttaaaagaaagcttgccaacccggaaaatccgctgacccggtgattctccattctttaaaacctttgatttgtaacacgttacattaacagtcgcttccattcttggtttaactctcggtttaactgaaccaagtaaaccggcgcgtttaaggcataaaaaaagagagttactttggtgtaactctctgattctttggtgatccgcttggggctcgaacccaagaccccaacattaaaagtgttgtgctctacctgctgagctagcgaatcaatcctttgttattgctattcttccgaattgcgagtgcaaaggtacagtttatttttgtatctgcaaacatttctagaacttttttctaaaaaaaatgcattttatccattattcattcattgcaattaaaacttccatgtacttccgccaacagtttccaagcccttgcactatttcacaataatctcttctataggctgtttcaactccttatccaatggatacgactgatacttcactttatcaaaatcaatcttcttcatactaatacaacgaatattgttattgtatgctgttttataatacactttcctgtttgtcaaatcaatagccgaagtccattgtgtggcactaggaatatcaggtgctttccctaacgcatgttctataccgataggaatatcaaaattattcaggatatgaaagctttgtaatatagcgtcatacgctgtaggacacaccggagctgttgccttataaaacgctacacgaacaaaacgggatggaggagttacatcccccggaatgccatgaaatccggcacctgcgccaaaagggaaaatagtcaccccaccccattgctgtggagtgacagctcccggatatagatttacataattattcaagttagtcacctgccatggaaaatcgggagaattggtgagtactcctactttattttcataaaaataaggaacaccacctacaaattccaacaccatttgatttcctttagcatcgccaatgcgccaatgtaccgtagaacttttaccaggtttatcaagagacaccaccttcaccccttctatagcttctctcacttcttctatagtagcaaattgggaaagcatccagttcaccacctgcaaatccgacaaagtaattgcattttgagcctcatcatattcttcatacttcccataatggggaaaataaaacaatccagccgaaagccctacttcattcagtccttcagccacaaactctttctgaatgatagccagtcctaccagaccatatttagcccgaaatctcaagccatttacacccgttggagtataagataccaaatcctgtcctctgggaacaataacatattcactcggaagataactgtccccccactctatagtacgtgcctgcacatatccgccatcttcagcgaggaatgaaataccggtacatgccgatccgcttgcaatgcctgtcagcaataaggccaaagctatcaaaatctttttcataaccattttaaatctatttatgatagtaagaacaaagcatcggacattttagttcttgtttacgcaacaaagataaccaaagccatcaaacaatgttccggcactgattgccatacaaatagataagaatagaaaaacaaaaggagtgacaagttcccaatcgagtatatacaaagaagtaggaggtgaatttacaaaacacacctccttacccttaaattatttattcagcaaacaatttactacatctttctcccgttctttaggtaatacggtcaagctaaccaccgtccccccttttagaacagcctctacagtagtctgtcctgtagcatgcaatttgaaatgcacatcccaatctttaggccaagcaggaaacaataaaatctttccatcggcttcctgcaacagcatttcctgcatacctatcatgccgctgcctccccagttatggtcgggagtccagtcgtaacccggtccccaaaaggcgggaaaacgatgaggaccgttcgccattttctctaaggtaagttgtgcagcctcctcggtcatacccagacaagccgcccagatattatcttgtttccatccgatatgtgaacggaatttctgtgcatcgggatcatatagataggtattacgggctatttccagaccttccttccccactccatacatacgccagggaaatacagcataaagctggggagtttctatattgttcacccgttcccaagcctgtgccggagcaatcatttccttcccatccactatgcgcaaagggatctcaggaatacgtgccagcatgtccggtttacgtccgtaggtttgtaaaacagagcgcagcgcggcaatggttgaggatggattataagccatcttataagtttcacaagccgatcccggataaatcaccagtttgccgttaccatctaaatccttacgtccacgctgtaatgccagttgacgataatgctcatcaaagaaattaagtgagctttctatcaaagggatataacggctgatatcagcctcattataacgtgccgtttccagtatcatctgacaaaattcaagaaccgtatcccattcgtattccagccatgcattatattccaaccccctgtcatagctttcaggacgtttaaagccatactcggcaggattgggcagaccgaagttctccatttgttcggtgaaacaggcaccggcatgtccccaataggtacgggtacgtgcttcggctgtcggcaacaaacgcagataaaagtcaaattgtgatttcatcaagtcaaagtcaccgcttttcagcatgggccaataaaccagacgctgattctgtgcagtcatggttcctcctccccatttccggaaatcaggggtaaattccattttctgatctacatacataggatcaaaagtaaacagtcccccgttaaacttggtaggccactgactataggcgttacatcccaacatatagcggaacagtgtatagttacggatagcatctcccgcttcaccttccccctcaataaagctacgtttccaaaaatcattccaccaacggcgggtagcctgtttgtctttggatacatttatttccttctcagtgcgggccaaggatgcttcccatgcaggaaccgtactttgttccgtattcagaacaatccgtgcagactgcttataagtaggtttcttgcttttgtacatccatgccagatactcagtacctgcataatgtccacgtcgtgtaccgttataaaccagattatcacctgataaacgccccccaaaaatcaaattcttcaaaggattatacagttgttccttcacttcattcattccctgctggtccactaccacatcaaaaatagtacgttcaggattgcgatggaaaaaagtaaaattatcttcttccacacagacagagtcacgcctagtcatcaatccatcaggaatggcccatttgtaagagcattgctgcccttcccctttacgcaccggacgatcttcataacgccagctttcaaaattcacacgcatggaagtcagttccttcgttttcacctcaacatgtaccacaggatgaaacacatccacccaaataattagagtggcattatcactacttacgctgacatagccatcattaagatgcagagtctgccgaaaagaagccgttccggcaaaagggttcggagtgagcctcacacgaaaccgaccctgcttcagcagacagttattctcgtcaaaagaaccactacgactaaggtagaacagaacatcgtcattctctacccatacattcatgccgatatcaccacccccgcagggcatagactccgaagcattccggctttgagtattccaaaccaaattggcaggctgtccccacagaaactgcccgccaataaacactaataataaaaacgtaaagatattcttcatttttttctgtttttaccagtcatcggaacggaaagacgatacaggtaaatcttcaccaaacaaatctccctccacataattctcgaagccataacgaactgccaccggatgaggtactctctcgctctttacaagcattttacttctctgtatccacgctttagcaggataaaaaacccgatctttacctgcaacctgaaagttatatgattcaaaacggtctttacaatttatccacatcggtgcccgatcaaaactgactattaccgtatcattctttacttccattcctgtatagtaaggactttcggccgtaacacctttcattccgtaagtttttaccaatgccaaacgcgccagacgttctcctgccaccttctttttacccggatgaatccccgttttcattcctgcgtccaacaatacagccataccactattgcccacccggtgttctaccatagcttgttgttcgcgaagataagcagaatttatcacattcttgccaggctcagtaataattccataatcataaggtgcaatttgacaataatagaagggaaattccccttgctgccattcttcgcgccacccgcgtatcagtgcactgaacatatcggcataagtagaagcccggttatagttatcttccccctgataccagataactccacgcatggctaatccgatgagcggatgaagcataccgttatagagtacagtcggagtacggttctttgacttgatatcagcttccgattggggaatctttgcttcgggaaatgccttcaaccaatccggatgcatccaggcttcacaggcagaacctccccaagaagccacaatcaaacccacaggtatattcaactgctgttgtatcatccgaccgaagtaataagcagtagcactaaactcacgcacagttgccggaacagcttcctgccaggttcccaccacatctgttttcggagtaaaagaggaagaacgctttacggtgaacagacggagttgcggattacggctgttcatcacatctgtattgctattctccaccggctggtttttaaaacctttcatgggcatttccatattactctgaccggagcataaccataattctcccatcaggatatcacgtatttcggtcagctttccatcatcaaaagtgatcgtgtaagggcctccggcagagggggtggataaagcaagtttccacgcgccttttgcatcggcagtcgttttataggtttgtttatcccaacttgttgtaattttcaccggtgcatcgggagtagctgttccccataaattggcacgagtctgctgttgcatcaccatgccgtctgaaaagaaagcgggcaatttcacttccgcatttgccgacaggcaagtcaaccatgcccaagcaatgcccagtagtagtttcttatttttcatgttatgtgtgattagcattattctttagttctaaaaaactcgcaaggtcccatccatccggcaggtaacaaaccatctccgggcagacggaattttgcattcgtccatatcccctcaaaaggcgctttatcctgatctgctccacggagcgcattcgcccaggtattcaccacctccacttccaagacattggttccgttacgaagcgcatcggtaatgtccacttcgtatggagctgtccaagccgtaccgcatgcaatgctgttgacacgtacagtcgctacattggctactttacccaaccgaagaataattcttccgtcctgttcattcttccatctgaatagccctctgtaagtggcatgtccggaataatattttattttttcatcctcttccttactccagtcaaataataccggacgagtgacagttttgcgcacggaagggaatgttactgtccattccttgatcgatatggatacaggttccctttcgatccgttccggagaaacttctgaagattctttggggaatacgacaaatacagagccattggctggcaaagacaaagcgacttcggtacggccgtccgcttctttccattgtgccggacgggtaatggttcctgttaccgcattccacaattcaggcgtgcgccctgcaatgcggaaagaagcgttgaatgtacgcaaactgtccacctgattagccacaaaataaatctcatactcttccccgctccgatgagtatatgccacatcagcaggaagaagtacatcccgttccacaccgaaagaagaaaaatcatcttcccgataaggcaattgcggaataatgacacctgccgcgcggagttcctctacttttgcctgtgcctcaggagacaacggcaggttatcaggattcataggacgggctgtaggaagcaccaatactttataagaagctcctcccggaagtaccattcttccattctccgcttttgccaaacgtaacagagcgtctttgttaaaagaatcgtaggcataaccacgcatcgggttcacccagtcttcgggatcggccatgtttgccgaatgggtaacaccgacaggacgcacacgggtgggttgaccttcattagccagccgaatccgttcgctttccacccgttcggctccatagataccgggaagcatcgaaactaaccgttcgggcaaaatggaacgtcgcggcatctcttcaccggtaaagacggcgatatcaaccaccggatgaccgtattgcaacaaagtctggcaacgggtgatgtaatctacaaaagatttcccttcctcccaccaggtctggtcgcgctggaagaagagtccgatgccgtccaaggtcataccgggacggcggttcatccaaggattatgggtatagacatgaaagaagagtttattgatacccagtgcatagttacggtccagcaaaggtttcagcatggcagggtcttcatcccatacgccacgaatttcagtaaagccttcggcctggataatattctttccataaatatgcgcgccactgatggcatccagcatatcattgggtttatcgtgcgtaggactgttcagccaaaattcccccataggcagatccactttctgataatgcatcaatccgtcactgaccatagtaggagctacgcactcggcagagaaccggcaatcgtattgacgggcacagtctgccaatacagtgtagaacacatcagtcaccagttctccgatggtggtacggacatcccgcaatatctgctcactgcgggcggcactttccatcggaatacctgccagcaaaggaagataaggcatcaaatcatatccacggcgtttcttaaattccgccgcgaagttatcactccagttctgactgccacactcccaactgtctacgtgcatatatttcaatacacggcgtgccacggcttcatccgtctttttgaacatttccgcaaaccagttcgagaactgtttctgaacagccttggtgctgaacttgtcgcattccaatcctttacctcctccggcagtagcattcacatgtccggttgccgtatgtcccatgcggagaatacgccatttaccttcgggtaaacgggcggtcagcctgccctgatacaaagggagattgatcaattcatccggttgcacacaagccgcatcgggtatttccgtcgaagtagtagcagtagccacacgccacaccagtcctgcttttccctcccactgatgaatacgcggagccgtatgaaggactatatcattgattttcaaattcggtttccatttagctgcatccagatcctcactacccggttcgcttcccacgggagtccactcaaaacggaagtaacgggcggtaacaggggggatggcatgagtggactggaaatccgtattctgccatccctgccgggcagggaccagttgcttcactgttttgaacgtccgtccgtcctcactggccaatactttcaggcgatgtgcctggtagttatttcctcccaaaataatttccacgttgctgcaagtcacaggttctgcatattcatactgaatccaacaaggataagaggaacggaagactcctttctcatccctgttcacagccttggattcatctttgataacggcctgtttcaaattgccgaaagttaccttcggcttcaatgaagtatcctcaggctgacgctccaatggaatggcgtaggtaacgatatcttcataatagccatccagtgcttcgggcatgggcaaagtgagattccggatatttccaccgttcacaatggtgtcactccataccactttttgcatggattcttcgggagtcatccaaggacctcccgccaaggcaaagccgtcacagatgtgcatgcccagttgcattcccagcctgtcggcctctttcatactatgagtgaccatacgccaccattcgggggtaagctgctgggctttcccttcgtattgaggtccctgctccactcccttgatgggcatcagataggctccacccaaacctacacggtgcatggcttccagatcggcggtaatgccttcgggagttacagcgccaaacatccaataccagaaagtccagggacgagcttcctgtacggatgaatttacaaactgttgccgtaaagcggattgtgctatcatcggttggaatccggttgccagcaatatggatacaaacagatgttttatcttcataagctatttattctatatttaatgataaacgaataaagttgtaatttgtactcaatttttcaaatatagagagttcaagccaaataaaaaaagaaaagggaagaataaacaaagttcctcttccctttacaatctattttttcactgttattcaaattttaacgtgatacttcccccatatgctccatcagcccaaaatgcttgtgaagacggacctatcaaatctgtcgtattcactttattacgaaccggaggaattactttcatcagactgatgccggtagccgggaaagtataaagcaagccgtcacgaccgtcgcgaggctgataaacccctacataattctgaggagtacggttacagatacttatcgttccttcctgcgttttcaaagtcatccattgcacattagcaaagtaccctttaaattcgggataagtaaagctttcggcaggaatgggatcattatactcattttcccatacgcccaactgcggaccatgcagacggttctgccatacacggtaaggaccgtcacctacccaacgcttgctcaacactttatcttccggataatcaaacatcacccccatcaaatccactacaccgctgaagttgtatgtaaagtctatagcagcggtaccgtcaggagcgatagtccatacagcctgatcaaaacatcccagtttgtagttagcggtaaccactacgttattgccttcttcacgcacggtaaaacctgtaaaacgaccggcatcatcaaatgtagtgtattgggttttcttcttttcagcctctttgtcatcatggttataaaactggtccatagaacggtccgaacgcttggcggcaataaaacgaggaccatttgccagactgatgatacggcttccaacctttacccccttcagttgtccgtctttctgagaaaaagtaaatgtacgtcctccggcatccaccgtcaatgcatcggcagtttctttataagaaggcttgtttccggcagaagcctgctgcaatccggcaacgtcgtccagtttataactccacgtaaagagatcattcccctgcttatccgttactgtcagcatcaaagcatgggcccccttgacagccgcaggaatagtcagtgtacccgcaccgtgagcaggaatgtcgggacagttcacctctccctgtttcatcactttcattccccccttatcggttacagaaggcaattgcacatatttataagtgaaacggcatgtattcgcattcaggaaatcgtaacggttctctattttcagtttgccgtcaaactgactgtcaaggctatcggtcatgatttgaataggacaccacacctgcttgatggtaaagtaactgccctctttttcgtgatgcggacctacaatgccatcggctccataattgccgcagttgtcaatgaatccattcatatccacacgcttcacgccctcatcggccagtacccaaaggaaacctccggcacaacggggatgcttacgcatcatttcccaataatcatacagtccggctccgtgtcctccatcgtacaatccatgcagaaactcggtcggcataaatatttccggcagacgcatatagttctggctttctccgtaagaacgatagtgcatggtttcatatccactgaagttgccttgcggatgaagcaccggacgtttctgaggatcatatttatggaattcaccatccagttcagtattccagcctttttcattaccattgctccaccagataatacacggatggtttacatcacgggtaatcatttcttttaccagcttctgcccgttgatagtttcgtgcttgccatgccagccgcttaactcatccattacataaagccccagcgagtcacaagcttcaaaaaattcgggatcggcaggataatgactcaggcggacggcattcatgttcatgctcttgatcagcaatacatcttcaatgttctttgccttgctcagtgtacgtccgctttcaggacggaaactatgacggttcacccctttaatcatcacacgccgaccgttgatatacaatccgtcactttcacgtgtttcaatggtacggaaaccaaatttctgattttcaacatgcaatgttttgcctgctttatcaagcagtgtaaaggtagcctgatacatggccggagtttcagccgtccataattcaggagattttacagcgaaattaatcgaagcatggtcgctgcccgtacggacatccgaagtattttcggccacttttttccctttagcatctgttatgacagtatgtaccctagcaccttctactgccatattcagaaaacaatcggcatagaaattcccatccgccttcgcatctattgccagacgatctatattttgagccggtttcgccacgataaacacaggacggaaaatacctccgaaattccaataatcagcacgacgttctgccaaattaaccccagcattcgcactttccttgcttacagttacttcaagtacattcttttttttcgatccgaaaaatacccggtcactcacattataaataaagcggtaaaaagctccctgatgcatggagccggctttacgaccgtttatctttacctgcgtatcagtcatagagccttcaaataccagctctatctgtttaccattccattcggcaggcaactcaaattcatatttatacaaaccttgttcgtcagctactccttcaggaaaagccttaccatagaatttcatgccatattgataagtaccgaatccttgcagttcccaacaagaaggtactccgattttcgtccattttccggaattattaccaccggtacacatgaaatcccattgtaccatatcatcacagccacgtcctgacaagtattggcgttctgtttttacggaagattgcgccaacaaacctgccgataaagcaaggagtgataaaaaagttgttgctcttttcattttgatatttgatttttaatttaattctatatttctgtctgccaccggaaagatatgtcgccgtcgcctattcaaaccttttgccatacatcattttataagactgaagcgtacccgcaaagtatgagatttctgcttatcaatggcgtatttcttcagcactcccggaccacaactactgtttcctaaacctaaaaccgcagcatccaggctgagaacaacctcctttcgtggtttcaagtcacaatcatgagttgttttataaatatcatccacggtataatgtaaggccgaaaatgaaaatggccggtctatggcggtcacacggacgcctttaccctgtttattggttagaatcacctcggtaacatcctcgtgattgccactgtcctgcggacgcgggtaatgtgtgtactgttcactcaccttgctgttccatctacctatcagacaggacgtcttacggtcgggatagttttcccacgggccacgaccgtaccaggaaaggttctcatattcttctcccaatacaaatgcactgcccagacgaggcaattccggcaattctccttgtggcagataagtctgttccagatccaccgttccatccacatatattttataatgggaagaaacacggatgctacctttggcataacgatattccacaaccgatttcttcgatacggttccatctgtttcctgagttttcgtttcgggagtaattacctctacttgaggagcatccaatccctgattcttccaatccttggccaaccagttaccgaaacttttatcattatccgtcggagcacggaaagcttgaaaataactatcttcccataaatccaaaacagaaaacttacttttacgtttacccggttgtacaccgtcagccaccgccatcaaatgatcattcaaggcaaactgttcctttaaaatctcatgcccggccttcgcccataaagcatcttctttcaatactatacttacattcaatcgaacatcagcctgtttattaatcttaacatcgggcaaagccatcgttcctgtttcaccgggtgccaccgatggaagcgccagttccccttgtttcatcttcttcccgttctctatcaaagtccacagacagcgatatccttccagaccaatgtgatgattacggttcgtaactcttaatcctttgggcaaaacatcttgttcttttggaaaaacctgaagatctttttccatttccaatttaaccggagcatatactttcttcacctcccaatatttaggcgtagtttcgcggtcactcatcaccacaccattaaaacagaaagcctttaaattaggccgatcaccaaagtcaccgccatacgccaccatccggcggccatccggcaatatcttataaataccttgatccacccagtcccatataaagccgcccagcatacgtgggttactataaatctcatcccaatattccttgaaattacctaaagcattccccatacaatgtgcatattcgctggtcatcacaggacggttatcattcgtgcgttccgctatttccaacaagcgttcccaacgtgcgttctccgcccgttccttgtcctccccttcgggaatgccgggattcagatactcctgtttcacacgggtatagaaacggctgattacatccactgttttcgggtcgggttctccgtttactccctgagctccttcatagtgtacgggacgtgtaggatcaaaatcatgtagccaagccgaaatagcagcaaaattaggtccgtaaccactttcatttcccatgctccacatcactaccgaaggatgatttttatcgcgttccgccatacgtaccgcacgatccagaaaagcggcgtgccaatcgggtgtactagccaatgttccacgtaatccgtgctcttctatatccgcctcatccatcacatacagtcccaagctgtcgcacagttcataccaacggctcacattgggatagtgactggtacggactgcattcacattggcttgtttcatcagcaatatatcctgcaacatcctctcctcactcatcacgcgtgccgtatacggatcgtgttcatgacggtttaccccacgaaaacggaccgaattaccgttaaccaacatttgtccgtcctttatttcaatacaacgaaaacctaccggctgttccacttgctctatggtctgtccgtttgcattctgtaaacgaagttccaacttatataaataaggagtttcggctgtccaacgttgcggagattttataacggcggatatacgtcccatcttacgtggaccacgttgcggataccattcattcatccgtgccgccttatgctccaaatccaagatatcttccacattgccaaccatattcactacttcccttccatccgcatccttcagcaccgcctgcaacgtataacctttaccgtccattccccggtaaacgctgagctgcggatcaatcagcagtcggaaatcttgataattcccctgaacagcaggcagagtgcgcactacatagtcacggatacggatatccggagtatgcaccaaatgaatactgcgatgaacacctccaaaacgccaaaaatcctgatcttccagataagatccgtcactataccgataaacttccagagcgatttggttctctcccggtttcaaccagcgggtgatattgaactcactaggttccatacttccctggctataacctatacgttcaccgtttatccacacataaaaagcactcatcactccttcaaagcgaagaaaagtctgcccatttgccttccacccggcgggcagcgtgaaagtacgccggtattgccccaccggattacgctccttgtaggtggtatacgaagctttaggctcccccatcacccgtggaggatctattttaaacggatatcctgccgatacataaataggcgttccgtatccgttgatttcccaattggcaggaaccggaaaatctttccaatccttgtcattaaagtccgtgcggtaaaaatccgttatccgttcggaaggcacaggagtccaccggaatttccacatcccgtccagactcatcgaacaatcccccttctgcttggcaaaaggcacaaaagcagcccttgccggttccctattaatctgtaatacatgatgattctcccaatcatgtatttgttgggcctgtaaggataccgtcatccatccgcacagtaacaatccatataatctcatatttttggtctttcttttcaaatgaagacggacgaaatatgattttgtaccatataaattgtaaaaagaaaacccttctctccgatatcatcatcgaaaagaagggcaaacttaacatggacaaaacaattatctaggattttgaactatattcggattagcatcaatttctgtttgtggaataggaagtgccaccctagggtctgaaggagcaatgacacgggcatcttcaggcatagtcagatgccagcctcccgaacggtccaccgacttgccattacgcatataatcaaagaaagcatgaccttcacctaccagttctttacgtctttctttcagaatgcgctccaggctgagatcagcagatgttacggatttcgccggattggcacgggtaactatcgcattcagatatgtcaatgctttttccgtattgccgattttaaaagcagcttccgcagcattcaaatagacctcggataaacggagaatacaaagatcattatcctgtggattgactgtagaaacagcatcggtcacactgcccgatttccccggatatttaatcagatatttcggttgacctttggcagctacaggcaatgtatccgcaacggcattttccggcaaatgaggaaatacatggcgcacatcttcagggtcttcattcagcaaatccaaataagcctttgtcagaatcaggttattccaatctttcacattatcggcatacaccatcggcgccccttctcctcccgaaccgcctgaaggttcagacatcgtaaaatagaattcaaacaaagactcagagttaaagtcttttccccatacagaaggatattcgtcatgagtaaaaagccggtaaattcccccattgtcattgattacttcttctgcacatttcaatgcattttcattgtcattcatatacagatacacccgggaaagcaaagctttcacactccaataattcatataggcatcatgtttttcctttgtcagtcctcccaacgcatcgttcaagtcctttagcacttgttcgtaacattgtgccactgtgttacgttccggagcatgatcttccaaggtagtctgaatctcaataggaactcctaaagaagccccattatccaaagtataaggcataccgaacaaacgggtcagatcaaataaagccagtcctctcattgccagtgcctccgatttaatccgtgccacttcttccggcctggcattccccgcatttccggcatccaacttttctatcagactgttagcctgatggatcactttatagggttggttccagacaagggttatattaaaattatcatccgccgtaacatcaaagaaatagtaaggcgaaaccctgcggcctgctcctttattaatacgtgcctgcacatcttctccacgacaatcagcataataaagataattatcaccataataactatgtgcggatgctaatcggtatataccattcaatgccacctgtgcatcatctatatttttaatggcatcatcactgggaactgccgtagaaggatctgtattcagccaatcagcagtacacgaaacaaacatcaatgatacagccgcaacaatcgataaatatatttttttcatttcgttctaatttaaaggagattcattaaaatgagacttctattccaaaactgtaagtacgcataggaggtgtttcacaaaatacttcaccggaaacaggtacttccggatcatactggttccactttgcccacgtcaacaggttactgcctgagaaatacaatcttgctttactgacacccagtttggtcaaccactgatccggcaatgtaaagcccaaagtcaagttctttacccgtaaatgatccgtactatgtacataacgggatgaattctgaggtcctgccgcctggccaagtacaaatcggggtacatccgtcacatcacccggcttttgccaacgatccaattcataaatgggcaagttatagttctgctcttttgcaccgtcggtttcattataagttccggttttgtcaaaagaatatcctcctaaagaataagtcaatgtcaatgccagatcaaaccatttgtaattcacgatattggtaaaacctcctgaaatcttcggatccacagacttataaggaattgcctgtgctgcagaagcgtcagtagtcactgttctgtcataattgccatttgcatcctgtgtattcatatagtacaaagcttttcctgtctgaggatcaacccccgcatattctttcacatagaaggtagaatacggcaaccccactttatggataaaccagcttccctcgatagactggtccaatttaccatccaatgatacaatcttatttttattgtgggtcatattcaaaacagaagtccaattaaagttgttaccggcaaagtttatggtacgcagttccagttcccaacctctattattcagttgtcccaagttccccaaataattttggaaaccggtagtgctactgataggacgattgtaaagcaaatctttcgtatcgcgattataatattccaagctgacaaaaatacgattgataaatgccaggtcgagtcccaaattcaagttatagttcttttcccatttaaggttcgggttcggtaatgccgattcataagatccaccacctcccatataattctgcccgtaggaataaagtcccatatatccgtaaagagcacccggctgattaccattcacaccatacgaggcacgtatctttaaatcactcagcacactctttatagattgcataaatttttccgcacctacattccacataccggatacagaccaaaaatttccccaacggttctcgggtgacaggcgcgaactgccgtcacgacggaagctaccggcaatatagtaacggtcatcataatcatagttgatacgggatacataagaaatcattcttgaatcctgagtagaagacacaaagctgttcaatgatgctgcattatccggttccaccaaataatctgaaggaagtttggatttatcccccattgctttgtcagtctgataattttcaatttcataagctaccaacgcatccacatggtgtaattgtgctatagtcgtattatatcccaatgaagtggaagaaatcaatttactatattctataaatccctttgccgtctgtgcatcactaccacttttagctccggctccactcaacggattccaataacgggaatctttctgaatattataatcatagctaagcgtttctttcaatttcaaccctttgataatatctatcgaagcatagcctgtagaaaacatacgtgtcatgcgggtacggttataatctgtacggatatcacgcaacggattcacattgctactgggatatgatcctacataattcccttcagcgtcacgtaccggaaaagacggagtggtattcaaagccacacaaaggaaaggattaatagatgatccacgctcctcattcatttcctgattcaattgagagaacatcacattggcgcccacttccccacgggaacctaccttctgggttacattcaaacgagctgcatatctgtccagattagaattttccaccaaaccctcctgacggttaaaacccaatgaagaatagaacgtagtcttgtcattgcctcccgatacggacgcttcataactttgatgatgtgccgtacgcattaattcctttctccagtcagtatatcccagttccggaatggaggcataatcattgatatgtaaatcggcatattcggtgggcgatgccaatcccgcctccggattcttggctatttcatcttgttgaaagttcatcaaaccttcataaattagctctctacgctgctccccattcaacgtcgggcggaattccacagcagcattagaaaagcctccatccatttttaatgtagccttagcacgtccttttgtaccttttttagtggttatcagaatcacaccgtttgccgcacgtgaaccatataaagaagccgctgccgcatcttttatgactgttatattttcaatatccgaagggttcagcgtactcattatattcgttttagaattattcatgtaagcggcatctgccgagccaccactcaagcttccggaagtcaccggtactccgtcaatgacaaacaaaggttctttcgatgcattgaatgaccccataccgcggatacgtatactttgattagcacccggctgaccggaatttcccgaaatggatacgcccggagtcataccctgcaacttctgttctaccgatacaaccggaacgttcttcaacaagtccccccgtaatgtatttgccgaaccggtaaatgaagatttggaaaaattaccatagcctgtcaccacaacctcatccaatcgttgtgtatccggatgcaaagatacattcagcaccccattggcaggtatcttcgccgttagtgtactcatacctaaaaactcaatcactaatgttttgtctttgtcgggaacttccagagagaaattgccatctatatccgtcaccacaccgatagatgtaccgggtattttgacagtagctccaattaatggttctttatcctccgctgagagaacgcgtcctttcactgttctattctgagcttgcacgtacaaaccgaataaacaagccaaaataaaaaaaacatacctagatttattcatgatttatatttatataattatataataatttatcatgttccggtcaaaagatatgccaacaacaagaagcatccgtcaaatcactgtatattaactaaataagtaaacagaacgtctgtaaaattgtagaataaatccacatgaatgtagaatttgtccacacaaaaaaagggtgtgataccacaccctctcatttaataattatttaaaattaatttttagtatatcccggattctgctccatatcaggactaaatgtaaactggtctgttggaatcggtaaaacacatttataataatcccagtctatttcctccacgatacccggtaaatgatatcctcccttacgaacaatggtctttccatttctcaacatatcaaagaaacgatgcccctcacctatcaattctttacttctttcttccaacaccctatccaatgtatattcagccgccgttacttcctttgcaggattagcacgctgcacaattgcattcagataattcaaaccttttacggcagatgccccacctattttcactccggcttccgccgcattcaaatagacttcagacaaacggaaaataacataattattttcaaaagatggagtcgtagcatctgttcccggccatttcttcaaccaccatacatcatttttattataaacattcttttccagcaacagacagcgaatatcctccgggtcactcaataactcatccacaaatttctgagtggcaaaaatctcacgatacccattccaatgcatcagatatgccaatgaacttcgtcctccattatcatctgtactattagcaatttcaaataatgattccgtaccaaacgtatttttcaaatcccatgccggaacatattcatcacgtgtataaagacggtacattccatttccttccacttcttcaatcaagttgcttgccatttgaaacgctttctcgttatcatcatgatacagataaatacgagacagcaatgctcttgcagcatacgcattcatccggctgttatttttagaagtactcattaaaggtatagcctcctccaatgtactgattatgaactcataatcctttgcaacagtgctgcgtggcggattttcatctaatgtaattgcatgatctacaattggagctccccaaccggcccctttatccttagtataaggataaccgaaacaacgggtcaagtcaaactggcaaagtgccatgatagtcatcgcctcacctttcaattcctttaatctttgctctgaaccttgcacttttccatcatcaatcgcattgatcacattccatgcattacggataatataaaaaggacgtccccataaatatccggcatttaagcttgtagagcgatgatcatataagtaacaccggttacaagttctcccgctattataagaactctgcatatcatcccctttcatatccccataaaaaaacatggttccgccataatagccatagctggacatcaaatcatacaatccattcacagcattatctatatcctgctctgtactcagtgccaaatccgtagaaacgctatcaccaggatgagtggttaaaaaatcatccccgcacgatacggccaataaagaaatcaagcctaatataattatattttttttcataaacagttcggtgttaattgattagaatttaagttcaagtccaaatgcgaatgttttaagaggaggagtaaaataacttacaattccattcaactccggatcatattgatcgtatgcagcccacgtcaacaagttggtacccgaaaaataaatacgggcagaattaatacctatggttctcaaccaagactgaggagcagaaacgccaacaatcaaacttttcaagcgcaaatgatctgtgctatgaacaccacgtgacgagttccaccagccaccatactcttgtccatacacatatcggggaacatctgttatatctcccggctgtttccaacggcggcgtaactctgtactcttattgtattgtgccgtataaccgtcatcctgcaaagcatacatggcaccatcgtaagaatatccacctaaatgaaacgacaaattaaaagataaatcaataaacttataattaaacgtattcatcaatccaccggtcaatttaggatatatatctttcaactccacacggtcggcatcattggggtcatacacaatattcctgcttctattgccattttcgtcttctttattgtcataatacatcgggcgtccgtcattaggatccactccggcatactctctcaaataaattgtcgcatacgaacaaccttcctttctgatataatttccatctataaattccggaagatccgccagttttacaatcttatttttattatgtgacaagtttaaagaagttgtccaactaaaatctttggtttgaatattacttgaacgtacctctatttcaaaaccggtattcttcatttcgcccacattcgtaagaatactgccaaaaccactgatagaattcaattgcttactcatcaataaatccttagtcgttctggtataccaatcgaaagtcaaattaacccgtctgaacagacttaaatcaacccccagattcaatgcatagttcttttcccaagtcaaatcaggattagcaatagcatcttcccacggagcaggttttccattataaaatgctccggtagtataagttccatgataaccataataaccggtcggcagattaccgttcacaccatacgatgctcttaatttcatatccgacaccacattctcccacggtttcatgaagttttcctgagagagtctccatgaagcggaaacagcccaaaagttcccccaacgggtatcaggcgccaatcgggaagagccatcacgacggaaactgaaacctgcataatatttatcattatatccataattcaagcttcctacatacgacaccatagcatcttcctgcctcgtattagtaagatcagcaggtttggcgccattatccaacgacggattaagtgtttgcccgtaaacctgtttctcaccatacatatcctcataatcgtatttcataacctcatacgctaaaaccgcattaatgttatgtttgccaaacgttttattatatgccagattcgtttgtgaagtataactcattctctcaatcatcatcatctgtccggatccctgtgtagcttccccatccttaccgtcaggcgagtaaaagaaaaagtctttatttaaagaatagtctactgtaaagatagtagataacttcaacccgtccaagatatgataggcagccttggcggatgccattgtacgtgccagacgtgcataatttgaatctacagaattctcatacagcgggttaatacctccattattctggaaacccgtatgataactgccatcctcattataaataggtatggaaggggtcaattgatattttgaagaataaagcgcactggcataatactgtccctccggcgtatgtttattacgagtccatgaaaaggtagcattcattccatactcaaatttattccatttactgtttgcatcaatacgaccggtaaaacgttccattcctgaatttatgcttatacctgtctgattggtgtatcctaacgtaccaataaaattcgatttttcattacctccgcttacagacaaactatagtcctgctgatgtccttttttcaataaagcatcttcccaatcagcatatccgttggccgggcgtgcagcataattgtcaatttgtccatccgcataagcctttgcctcggcttccgaatccccctgattcaaacgataattaacaaatccttcataaatcaactccctacgctcttcaccccccattatcggacgataattgtaagcgatatccgtaataccgtaaatagcctgcatactcaccctcattttaccttccttcccttttttagtagtaataaggattacaccgttagatccttttgctccatataatgaagcagaagcggcatctttcaatacggttatactttcaatatccgcaggatttaatgtctcgatcaaaccaagtcctcccgcactggcattggcacttagaccactcatatccctagacgctaccggcacgccgtccaatacataaagaggttctgtagaagcattcatagaagcaattccacgcacccgcactgtagctttagaacccggctgggaagaactggccactgaacttaaccccggaatattagcctccatcatctgtgctacagacacaacaggcaatgactccaatttatccgtattcaaaacagaagcagaccccgtataagtagccttcttaaaatcaccataaccggtcactaccacttcatccatcaactgcgaatcctctttcagcatcactcttatttgcccgttagcaggcactttcacctccgccgatttcataccgatgtaactgattacgataatatcaccctgtttagcatcaagagcgaaattaccttcaatatcggtaatcataccggtattggttcccttgatgattacggacgccccgattaaagacattccgttagcatcctgcacattacctgaaacatgttttttctgctgtacgctttccacacgatctgaaaccggagaagatagtgcatggttttccactgcgagcacggagctcaatcctgtaatagacattgccgaataggcaactacaaacaaacatctgcatttgtctgtaattcgagagtgtgtgtctttattcctcataaaattgagtatatttataaataccatatatgagttcagcttattcataccatattccaatcgtcattctgtcactgaataagcctaatctttctccgtattacattaaggttgtgacaaatatataaattaaaatctataaaagaaacaaaatgaatatttttttctcctcatatcgataaataaaaatacaacattcatccaaataaaaaatgtgccaaaagtatttactacctttggcacatacccacccggctgtttgatatatcaataaaccgccgaagcgatcacttgtataaacaaaataaggaacaccattgcaatcggatacaccgtagcatatgcaacactcggaatattactatctaccatggaatcggctgccgcaagaccgggcgtactggtcataccaccggtgatggtgcccagcaaatccaacaaactgattttaaagaccaacctgccaaccacaacggcaaccagcataggcacgacagtaatggccgcccccactccgaacaataacaatccgctctcctgaaaagtagccaccagattcttaccggcagaagtaccgacctcagccaaaaacagcaataagcccaactgacgtaacaactgattggcaggaccggacatagaccacaatataggtcctgtctttcccacggcactcagcagcaatgccaccatcagcactcctccggtcaatccgggtgaaaaggaaacgctgtctgaaaatgaaatatttattttgccgaacaatacacctaatacaatccccatagctatcgggaagaaatcagtatcagacaactgtttggcattattccccaacaaacgggcaacgcctctgagtccttcccgttcaccgaccaccatcagcttatcaccgaatttcaaggccaaatccggagaaggtgacaagtctatgccgcttcgacggatacgggttaccgtacaaccaaagttacgttgtaaattcagatcccccaattgcttgtttatcatatctttctttgtcagcaataaagattcaatctcctgcgtctgatccagaggcaattcaccttcctctcgttctccaaccaatacagcaaactgattcagcgcttcctcacttcccaccgcctgcacatagtccccttccagcaacatggtattcgctttaggcatcaatatagaatcctcatgctttacccgtgaaatgacggctcccgtcatggcacgtgcatttatttgcgccaaagtacgtccgaataccgcttgattggtcactctgaaaatgcaagttgtcagttccggaaaaccgctgcgccgttccagttccaacctgcgcgcttctttatccagatccacccgcataatcttgggtaacagcttcacaaacaaaatcacccctatcactccaaacgggtaagcaataccgtatgcaatggaagccaacggtgaatttgtactgtctatagctaccgccagaccgggcgtactggtcaatgcccctgctatcaatcccaccacactgggcgtatcaatgtcaaaagcatacttcagtcctaccgccgtcagacaggcagagcaaataataagcatagtgataagaatcagtgtctttcctttacttctgaaagaatcgaaaaatccgggaccggcctgaataccgatggtaaagataaaaagcaccagaccgaagttccccaattctttaggaatgatcacaccgaaatgtccgaaaagcaaggcaatgaagataacggccgacacatccagcgacaagccctttatcttaatcctccctagcataaagcccaacgctacaataaggaagagcgagaaataagaagaatgcagtaaatcaattaacatatttttaagaggttagtttcagagcacaaagatatgtaaaaatgccaaatgctgaaactttccccttactatttgcagaaaccattcctcctattgcacatccagcgcatccagtgccagcccctccatatccggagcggaaagcaccaccttataatagcctgcattgatatacgtacccgtcgttgtactcagcatacgccactttccgggagtttcggcaaaagtcagatgatcctccttcagtaccacccctttggagtcgatgaactgcatacgcaccttcataggcttccccgtagcgttcatgtatttaaaacgaagggcatagacctgtgccagaccggtagagatattccaggtaatactgcttttctcacctttaccaaagaagacaccggtttgtttcttgacctctttctttataaacttgcctttcaacatagcgtcctcggcttgataagtcacattggcacgggcatttttatcttcaggcaacagttccttgggagtcttttccatcacatccttgtcttgtgcagcccaactgaagcgatgggcagatgcattcacattcttcactctgttttgtatggcagaagaagagtgagcggaatccaagccgcctttacaagctatcgcaatgccacaaatcagagcttgccccgctttcacctccggaaaatcaatcttcaagactccacctttcacaacagcattcaccacctttttgcaagcgccgtcatgccccgcttcagcccatacatccaagtcatccagaagcactttatcatttaccgctacatcaaaaatacgcaagccttcacaatccgtctgtacgccacctcccgtaccatgccagggctctgtaaaataaagttccacacgatactcgccatccggaacgggaaagcggaaattcagtttatggcgtccgaaacggaaagtctggaacagctcccaatccctagtgccatgaatgggatcattcgtggtacgctggctcgcctgataagggctcaataactgcacactgtccgacggatagataaacgattccgcccacgaatgagaataacggctgttatcctgcgcccagacctgaccatacgtatccgtataagcatctcctccgcaattcaaacgataaagatacgtatatccctcagctcctttcaacaaatctgttccgttcaaccggtcggcagcaacaggcactataacagagccacggtaaagagcctcaaaatgaggagctttctccaaaccgtccagcaccagcacatcttccgctgccggttttcctttaaagtatcccacggcacgaagcacattataacggatatcacggttctcccacataaaatgagtacctaccccatgattcagtttccgtcccaagtattcagcatccaccgcatcattgtacagcaacacactgtcacaattgctgtacgcctcaatggtagcccgtctgcggcctgttgcaaaacggtcttcccacgtgtgggatgccagatagaccatcggatcttcggaagccggcacatagttggcccgatacatataatatacatccagcggttcttcccacggagtaaccagtcctttataattaaacggtcccaccttatctatccggcgatacgcttcatccggctggcggcgtcccggattatcatgactgctgaatatccattggaattgtccgcacacactgtcctttgcctgttccgccaatcggatcttggtttccatcagccggcacatacgttcctcgctccatacgccgttcgcgtcaaaggcagccggttcggtatgcaacccgatgctgcgccatgcgccatactcaccattcagcagttggttcttctgtgacaattcacggccatacttattcacatcaccaccataggttccactccagttctgaataacattccaatctgttccatcaccaccgttacacgtggtaatcacacgcatggtacgcgccgtaggatccatttcacggataatctcactacactcctcggcaaactccttaggcagcgtgctttcgttctgcaatccccacatcaccacactgggcgagttgcggcgttccttcacccactggcggagcagtttcttgaaattctcacgaaactccggagtgtcataccatacatgggccgagaactgagtccaccacaagaccccttccttatcccaatatttctgataatccaggtgatggggctggtgagcgtcacggaaagcgttgaagcccgccgcacggatctgtttcacacgggctgccacctgttcacggctgaaagcatggctttgtccgaactggtgttcatattcacataccccattgataaagacaggctgtccattcagatagaaccgtccgtcaccgtccttctgtttcaccggccaactgacggtacggataccaaagggcgtactaatctcatccgtagtactcttgccacgctttatcatactggccagtttatacaaataaggattctccgtactccataagacaggattctgcaccggtgattgttgcttcaccaccttcctttcacccggctgcaaagtcaccttctccgtcaggcggaacacctgcttaccatccgcattactgaatttattaaccacttccaccgtttcggcagtcttcccgtaatttttcacctccgtttctacaaagacagttcccgccttatcatcattccagatatgcactccgaaaggttcgatgcgtattgcatccgtagcctccagcaccacgggacggaaaatgcccaaaggctgggaaccttcactgaatccccattccgaagaacaaccaccgcatacccaaggcatatcggctatcatttcaggatgctccgctttcaccaccagtctgttctctcccggcttcaacgcctccgtcacatccagtgtcaacgtagtacgccccacgggatgacggccgaagtcctttccattcaatgtaacagtggcatacgttcccactccctcaaaacgaaggaaataacgttttccgaatgaagaatcggaaattggaaattgagaattatccagcgtgaatatcttttcgtacatggcagtaccgtgaagattgccatgagtcagttggcggtaaccgtaataatcgtcccagttatgagggatatccaccactgtaggggcattgtccgcctgcccgtatgcacttttatcacaaagccatgttttccatcctttatccagttccatcaccatccggcggttcttcacctcccgttccgggaaatgcacttgcgaacgtcccatcggcttgctggtagcaatggctataccacgttgttccgcgtcattcacggcacaataaaaatgatacaccaccccattgtgtttcaccacataacttttatgagcgaacaattcatcatagtctttggaagggataatcaaatccgcccctttccaatcggtccagtgcaccaggtcataactggcagcaaaggtattgaatgccttgtatttgcggctcggttcaaaagccgagaagtagaacatgacatacacgtcgcccattttctggatatgcgcatcccccgtgatggttccgtccgcctcgtgtgcaaagaccggattgcccggatatcgtttccacttcttcatatcctttgacaaggcgatacccacccgttccgctttcaaatccgtttccggatgccgtcctgccgcgttatagaacatgacgaaaggagcgcccagtgttttctccttatcccaatagaccacacttttgtactgggtcagcttttcccaccattgcgcgtctttatcatggatactcatcacaggcttgtcctgtgcctgccactcatgggcggaacccaaaggccggtctgtccaggccaaaccgatatacagcggcttgttcaccgattcatatccggtcccttccccacccagataagtcatccaatgcttgcctttatacgtctgcagggcatagcttcctccccactccatatccggcaatgcagggaaaccaccacgctggttgcaatcccagaatccgtcacgataagacaagacacgtcccaatgtacgccattccaacagattatcactttcggctatccatgtttcgtatccacgcccgtccagtccgctcttaccattataaaccacgtaggtcatataccacttatccccttcgcggaacacggtaggacagtctattttatgcttgttgtcggcaggagctacagccagcccatatttataaggagtcttggcttcctcataaatctgctccatgcgcgattgcggaacttcacgttgggcgtatgttcccaatgacaacagtaaaaatgccaatatcaatatcttcttcataattatcttttttatctattggcaagacggataaaagaagaaaatgtacccattcagagaacttttatctcattctctattcttaccatcacatagcaggggtcagctcaacattcaatcccaaagcagaagcaatacgataaaaggtagaaaccttaggctctgtttttcctgtttccacacgggaaatataagacttattagtccctatcttttcggcaagttccgcctgtgtcatatttgctttcttccttgcctcttcaattatttgcccggtaaagaaagcattagccctgtcttcggcagccttacgctccggagtcccttctttgccaaacacagcatccaactgtgcatcgacatcaaacatctttagttctttttcgctcataatattctttctttagttttaatgctttatcaatttctctatctggtgttttctgcgtcttcttttgaaagccattgaacaatataacaatatgcccttcatcataacagaagaaaatcctatagatattaccttgccactctattcttaactcatacagaccctctttaagaaacttcacatactttgccggtagtctatcttgagtcttcaataagagtaatccatataggactttttcttgcgtacctttatccagagtatcaaaaaaatctttatagtagttttcgtatgctattatctttctgctcatacgacaaaaatagaaaaagtttatcagttaagcaacttttccttataaaaatcttagaactatgtacaaaaatggcgtaaaattctcaagatatacttgaaaattttacgccatactgcgattccggcctctggaattaaggctactaatagaacatccagtccatcgtttcctccgcaccggccagtcccgcattacgcggagtcacctgcgcgtctgtaaatcccagcaccatcgtatatcctttcggcagcaacaaggtatgctttccggcctcaaaatgataagcgtgtacattcgccagcggcatacccgctatgcgtatggcattggtcagtttcggttccgcctgaccgtaatcattggcagaagcgtccgtttccagtttcggggctttcgcatacttcttctggtcatcacggaaataacctaccaacaaactcaccggagcagccgcttcaaactctattgtcgtaccttccttgcgctgcacatccccgttcattctataagcagtcagcccttccagctcggcggccagcgcatccaccttgcccggtacattggagaacaggcttgcccccgtcgccagcttcaccggagccagtccgttcaggatcttcacatttgcggcggacaaaggttttatctcagctgcactttccgtcaccttacctgccgccctatctttcagcaactgcaagttcgccttgaaattagccagctcattttcataatgcaccagcatctctttccaggtcttgttcttgccaccgtcaccacctataggaatacggcgttgcgcggtctgcatactgttggcataataataagtactatccgtcaatgccaccagcttgcggtaatgatccagactttgttccatcaatggaatagcggcatccagttcattcagatcctttccccactgatagttcaagacacgctgagcagctttcactttcaggttaaaggcataagcaaattcacgatagcaatgcatgtcattccgcaaacgtccgaactcctctttattacgagtcaccgctgcggcagccttgtcaatggccgccaccgccttgtcaccgtgttccaccacctgcgccacaatatccagcggcaattcgcccacatgcggctgtttcttccattccttctccacatattctatcagcttctcgccctccggcccgcaactctcataaaatcccggataaatggtatatttataaggattcaccaactggctcataaacatccccagcaacaaagtctgccggttcccttccgtgatgccgaaacggcggagcaacttcggagcaatctctccactctgctcgtatgcctccagaatatctccggcttcggcaggagtcgtaccataaaaatcgcccaactgcttgtcccaatattccacttcggatgaacggtcccgatgacagttccatgcatagcgtccccacgtcttgtaccatatccagtcacggtccagctgatactcccgtttgccatccgccagtttgtccgccgtgtacggccagtcccaataagaagcctgcggatacagatgcagagcattggctccatgtacattgtgcatggcattcaccgccttctgtacaaagtcgggagatccccaacgccacggttccaagtttgccagaatatgcacattactgatatgaatacttcccaaggcactcaagtccgagtgtatcttggaccaaggtccgcgcggttcgtaagtagtcagtgactcaccattgtatttatgcatggtatagaggttcttgtataacggcagtgccgcatccatcaccatcttgcagtccgtatcatgcgcacgcagcaaaatgggcggttcgtccgtacgtcccagtgccttcagtccgtccttcactcccggaataatggttttggtgaaccactccacatcatcctcgtaggtatccatagcctcgcccaaacaaaccagcagacctacattgggatatttttctataaacgcggccaccgacttacgtgtataatcactgatcagcggagtaatgggacggttacgatcctgtgttttcaatccgtaatgctcggcaaaaggcttgcttaacaatatattataaaacatctggatcacaaagatacctctcttgtccgcttcggcagtcaggaacgagaacatttcctcatttttcttgaaagtttcctcatccacctctacggcaaaaggatactcttccagcttcaccaaggaagcaaacggatgcccgttccacagatacaaggaattcatgcggttttccaccagcatatccagatattttatccattgttccttatcataaaaccaagggaagctctccggcgtatagggatactcatacacccctcttccgggcaggtattccattttctgaatccctacacaacctccgcgaagcaccatttccggagcatccgtcagttgtgccggaaacttcaaatccttgtattgccctacatgatctatcaattcccgacagccgtaaatcacaccgcttccgtcgtttcctgtcaccgtagtcatgtttccacgggtagaaatggtaaacccctcctttttcagtccggctgtatcagcagcctgttccagacggatgcatacctcatctttatccacaccggcagtatccgacaacataacagacgaataccccgcatcttccagcgctttcttcaaatgttctcctgcaaacagcacccggttcgacgcctcctgcggcatcacaatattcacattgggtttctcgcacccccatagcacgcacatacatgcgacaagtgttcctagcctgatatttttcattcttttcatataaattatttacagttagacgaaaaaaacgacaagacgtactcacaagacctccgccaatcgtcaaaaagcgaagaaaaagcacaagctatcacaaaaagaaaaaaagctgatgaacaaacgggggcaaacccaacttttaaaaggaaatgtattgtggaacagaattacctaacattaaaaacgaaaaaaacaatgaaaaagaaatctaacctgaccctatttatgaaacaacttatccggtcgctaaaagaagaagagcgtttcagtaccgcccacatctaccaaagcaccctgaacgccttcatgctcttctgcaagaccgatgccatccggttcaaccagatggaacgttcacgcctgaaacaatttgagaaccacctgcgcaacaagggatgtacctggaacaccgtctccacttatatgcgtaccttgcgaagcatctacaacaaagccgtggacgatggtctggcggaagaaaagccccgtcttttccgtcacgtatataccggcgtaaaagccaataccaaacgtgccctcgatgccaaagacatgagcaaattattaagcgcctcccttccacgccccctgccgcaaagcatgaaagagagccgggcatggattaccctgatgttcctgttacgcgggatgccctttgtggatctggcacacttgcgcaaaacagacctgcaagattccgttatctcctaccgccgccacaaaacaggagccctgctcaccgtcgagattcctcccgctgccatgaaccttatcaaacggtatcaaaatacagactccgcctccccctacctgcttcccattctcagtggaaaccggaaaagcgaagaagagtatgcagaataccaacatgccttgcggaaactgaactatgacctgaaacaactggcggtatactgcggaatcaaactcaacgtcagttcctacaccagccgccacacttgggccactttggctaaatactgtcacttttcggaacaattgatttgtgatgccctggggcactcctccacaaaggtgaccgaaacctacttgaaaagctttaaaaacgatgaattagacagagcaaacaaagtaataattaatcacattaatatttctatataatcaattttaaaacttcacattacattataaaacaacaaattacaagactgttactttagaagtaacggagcagattttggaagcaaaagtatacaaactttaaatacaatgcaagatttctacacttttttttcgtttttattttaaatttttttttattccgcatatacctctccctacccatactccgattgtcaatatgagtgaagccacatttccggtcttttatcttctctaacagccactaaatctttatcttactgctgttttcatgttttttcgcctccctcctccccttccgttacttctaaagtaacagaaaaaaaacaaaataaaaatattgacaatgcgacattcttacttatttataatagcaatcatgctggcagttatgactccgcgtatagccccggctcaaagtatcgctttaaaaagcaatgttctttatgaccttaccggcactctcaacctgggaggagaaataaggtgtgacgacacccattcattcaatctgagtgtcaactataatccctggaatctgggagaaaacaaaaaaatgaagcacattctgatccagcccgaataccgttggtggctcaatgaaacattcataggaagttttttcggggtgcaagcctatttcgcccaatacaatttcggtggaaccactcctttcaccacggtcaagaacaaccgttatcagggtaatctgataggttgcggcattacctatggacaccaatggctgctcagcacattctggagccttgaagcaagcatatctgtcggatacgcccatctcacctatgataaatacggtcccgccaaaggagacgcactcattgagaaatcccactccaactatgtcggacctacccagctaggcatatcattcatttatttcattcaataaatataaaagcaaatataccctatcagtcatgaaactcaagacaaacatactattcagtcttttattatgcggcacctttgccactgcacaaaacctgaaactcgatatcctgcctccctccgtcactctcggacaggactctgccacagtgttcatgaaaatgactctcaatgttccccagatggacaccaaaagccatatccgcctcactcctgtcctcacagacggaacccacacggcagaactccctcaaatcctgctgaacggagaacgtgcacaccggctataccgccgtaccctggcgctcaacaaacgaagaggcaaggcagatgtaactcccgtatttaccgctattcccctgacagacagcgatcagactatccactaccgtgcttcccttccggcagccgactggatacagttcgccactctgaacctcaagaaggaagtcatcaacggcagcggagagaaagtacaaagcgaaaatatccccattccggacacagcaccccatatagcaacagcaacagatcatttcgttccccaacaggacaggaaccgggaagctcctatggcagcagcctcaccctctgcccccgttgttccggaacaccgtcctgtttcccctgctccgtccgcaccctctgccaaaccgtatttcaagggaagctacgtatctcccgaaagcgatgccaccgatgagcgcaaccagaaagagctgaacttcagtctggacgaagcgcgtgtcatagccgaaatcaacccgcagatgctttcgttacgcgagctttacaccgtagccatcagctacaagaacactccggaacagttctacaaaatcatagacatcagtgtcaagatatatccggcaagccccgttgccaacctcaacgccgctgccgccgccatcgaacggggcaacacacaggcagccggccgctatctgcaaatggcttcccatgaaacgcttgcctacaagaactgccgtggagcctacgaactgttgtgcaacaacacctacgaaggcatccgcctgctgaaagccgccaaagccgaaggctcggaagaagccacctataacctgaaaatattctttgaatccaaccaaaccaatatacaataaaacatgaaaacccggcatgtcctttcttgtcttctgctcggcagcgccctttccgtttccgcacagaaaacggctgtcaaaagcaacctgctttccgccgccaacggtgcgctgaatgccggtgtggaatatgccttcggccccaaatccacattcgatttgtccggcagcatacgcccgtggaaacgcacggaaggatatgtcaacaaatattggctcatacaacctgaataccgctactggacttgccagaaattcaacggcagtttttggggagcctatctcaacggagcgcagttcaacgtaggagggaaaaagatgcctttcggactcttcccctggctgaaagagcaccggtatgcaggctggctggcaggcggaggcataagctacggatatcacatcctgctcaaccgccactggaatatagaagtttccgtcggtgtagggtatgaatatatcgactataagaaatataaatgccccgacgtgtgtgccgagctactggaaaaaggccattatcactatttcggcccttccaaagcatccctgagtatagtttacatatttaactaaagagccatgaaatacttattctatcttatatcatttatttttcctacgctttgctcatcagcgcagccggcagaacgggacagttcgatttacatcgcctcctcccggctctaccggatgggagaaagtctggtagtgtccatgcaagtagacattaccagacagattccctctaacgaatcagtcatactggttccccggctcagcgacagcctggacaacttcatccagcttcccgccatctatgtgaacggtcgtaaacaacatattttcttccaacgtgaaaccggccggcaggaaaaagactatgaagagttacgccgccgcaatgaccgcaagcaaagcgtacactacttgcgcagcatccccttcacccactggatgaagcatgcctccttgcatctcatcgaaaaagaatgcggatgcggagtcccccgccatacagactccacctatctgacccgcctgaacatccttcccgatatccatccgcacgtagcgttcatcactccgcagatggaagaaaggaaagtgcgcgaagaaagcggacgtgcctatctggacttcccgctcaacgaaacaaccatctatcccgaatacagaaacaatccggccgaactggcaaagataaagcgcagtatcgacctgataaaaaacgataccaatgtagtcatttcgcatattgacattcacggatacgcctctcccgaaggcccctactccaacaacgagcgtctggcgcgggaacggactcggaccttgaaagactatgtatgcagccaatatgctttcaacgatacattgttcaccacccattacacccccgaagactgggacggatttgtcaagttgctgaccgacaccgttatcacccatcgcgaggaactgctacatattgcagaaagcaaaagcagccccgacgagaaagaacggaaaatacggaaacgttatcccgaagagttccgtttcatcctgcaacattggttccccggcctccgccattcagactacaccatccactatgtggtacgtccgtttacggtagagcaggccaagcaggtattccaaagcaaccccaagaatctgagtattgaagagatgttccgcatagcccggacctaccctgccggcagtccggaatacaataagattttcatgacggcggttctgcttaatccggaacaccccgttgccaatctcaatgcagcctgcatcctgctctcgcagggagataccaaaggcgcctcactctatctggacaaagccggtgagactcccgaaaagacccttttgcaaggcatcatgcaaatgctgaacgggaattataccgaagcggagaacctgctgcgcaaagcggaagaagcaggactgccccaagcaggtgaaaacctgaagatattacatgagatttactaatcacatttttaactaaaacatttttacattatgaacaaaaaattattattatccttcgctcttgcagctgcaatgacaggatgtatcaatgatgcagatgttccttcaggaaacggagacaatccggctcccggagccagaggagggaacatggagatttcatttgtagttcccaactcttccaacggcagccgtgccgcttccgccgaagactccggagtttacgaagacggaaccgccgaagaatacaaggtgagcaatgtaaccctctatctgtttgactcttccagcaagaatctggttactaccatcaacgtagcccaaagcgatctgggcgcaggcacttccagcggagagagcagcaaagaaggacaaaccattgtctatccttgcaacaaggaaatcacagtaaaaccgggcaactatgacatccttgccgtagccaacggttcacagaccttcgaaataggtcaggaatccacattattgggacagattgacgcctccacctatggaaacggcatgataaccagcgtacccggaagcggtttcatcatgtccaaccgcggctcggccaatatgaacatcaccgtagagtctcccgaagaaagcgacaccaaagcacacgtcagaatcaatctggaacgtgccgttgccaaactgatggtcagaaatgacagcaaggaaatctacacgttgaagaattctgccggagtgacttacgccacagtccgtctgaacaactacaaattcatcaacctgccaaacaagttctacaccttccgtcatgtcgctacactggataacgctcctgaaactccgtctgctccgtcatcttacagcgtggaagcaggaaacttcggcaacatcgccgacaacaacggttaccttatcgacccctatttcttcgacaagaccgtagctggagccactaccaatttcacaggcggttcattctacaccaaccacctgtcaaaacagacagacagcaactggtcgggcctggccgatgcaggaaagtacgtttccatgtactgtcttgaaaactgtatgttccgtccggcacagaacacagtatacaccaccggtatcatgctgaaaggtacatttacccccgaagcttcacagaccatcggtaataacggtaatccggtagaagacccgcttgtattcaacacactgtattatttcaactataagttctacaccacactggcagctgtaggcaaatatggcgatgccaatattgatggtttgacagaagaatccagtgatgcagaactggctgccaagcagattacccgtttcaccaagaacggaggcaatttctctaccttctacaattactggatcaaacatcttgacaacaacaaccccaccgtcatgggcgtcatggaattcggtattgtacgtaacaacatctactctgtcaatatcaccagcatcaagaacctgggtcccggcactccggataccaaacccgatccggatgaaaacaaagcattcctggacgtagaattcggagtatatccatggattgtccgtgaccaagatgccgaccttgaataaaacagtctcaaaatagaaaaacaatgagtaaaactgctactatcctcttcgccctatgtactcttttctgtagtgcatgttcctgggtagacgatgaccaatccgattgccccacaggctgttggttaaagttatcctatacctataacatgctgaatgtagatgccgtgaccactcaggtaaaagatgtcacgctatttattctcgaccaggaaggaaactatatagtccgggaggaagtagacagtcttacattccatcaaaatgaatgtacaatccaagtcccctccctgcctcagggagattacacctttctggtctgggcaggattggcggactcactttaccggcacactcccacctcactgacactgttacgcaatgaggcgggagaacaatccgaaaaactttcatctctattccacgggcggctggacaatgtgcatatcagcggcgaatatcaggttttggctctctctcttactaaaaacacgaatattctgagctgcatattgcaaagccagtcggccgcccctctggatacagatgatttccgtctggagctgacagcccgcaacggatgcatggatcaccggaacactccgacagactccattttcacctgctatcttcccttcatgcaggaaagcgccaacttggaagacatacaggtagtacatgccggaatgaatacattgagattgatggagaatgacgacacccgcctacggttaatctatcaacctagtggaaaagagattttcgatattccgctgacaccctatctgcttctgtcgcgtaatgtcgaaacaacctacatgcctccacaagaatatcttgacaggcaagaccgctataacctgatatttttcctgagcccgacagaggatccgcagaaaccttacatatgtttacaaatgcaagtaaacggctggataatacgtataaatgatgcagaattagataaataatctttctgttttgaacatttcaatctatattcgattccgttatgaaaattacttattatgtaaaatctataatacggaaccttatgagaaataaaaaaaaattcaacgagtttatgaacaaaacgattgaagaactgaaagacgagaaacgttatggcacggcacacgtctaccaaagtaccttgaacgctttctgcgaattctgcggatgcaagattgtttacttccaccagctcaacagggccacactgaaagaatttgagacccacctgcgcgacaagcagctgagctggaacaccgtttccacctatatgcggacactgcgcggcgcctacaacaaagcggtggaccagaaaataaccaccggcaactcccgcctgttcaatcacgtctataccggagtgaaaaacgatgtcaagcgtgcgctggaagtggaggagataaacaagctgctgaacgaagttcctctgaagagactaccggaagacctggtgcggtgcagggtttgggcaaacctgatgttccagctgcgcgggatgccttttgttgatctggcctttcttcacaaaagtgacttgaaaggtaacacgctttcttaccgccggcataaaacgggcggccaaatgatagtggatattccgccaacagcaatggaactgatcagacaatatcagaataccgactgcaactctccctatcttttccccatcctgagcggaaccaaaaccggagaggagctgtacatagagtatcagcaggcgctacggatcatgaactataatctgggcagactggcaagacgatgtggagtgataaccaaggtcagttcatacaccacccgccatacctgggccacccttgccaaatattgtaatttctctgaacaactaatctgtgaggcttttggacattcgtcagtgaaagttacagaaacatatttgaaaaacttcaaatatgaagagataaagaaagctaatgatgcaataattctatacgtttcaaaaaatggaaagaaaagagcataaatagataaaacgttgaatatcatggcattttaattctgttactttgtaagtaacagaatttattcggggacaaaaatagacaataaattgataacaaacaagaaatgccccgcttcttttctaaaaattaataaaaaagattgtctaatagataaaaagtaataatgaaatgaacatttcttaaattagataaaaatgatgatagacatcacacttcacacaatcagcgcaatgcattaaaatgttatatttcagatatttatatcttattcgttgtaaaatagcgagatgtgaattatataatatgtttattgatgaattttctgttacttacaaagtaacagaagagcagaaaaaagaaaaaaagcgacatagttgaaacctattgaaaaaaacatcatatagatctgacatataaaaagttttacctatgatacaagtccagagattcaacaaagtactaaaattagcagtcattctaggagatttagtcattctgaatgtacttttcatctcatttaattcaatatggaacgagttgtttggggaaagaacctgtagcggcactttaccccaaattctgactctgttcagtgtatgctattttgcatgcactatttcaggaggtgtcatactgcatcgtcggggagcccgtgccgaccaaattgtattccgggtactccgcaacgtgttctatttctcttttttatcgaccggactgatggtattatccgagcttgaaatatattccaaacgcttttttatctattatttcattctgctcatcctctgtatcactgtctatcgcctgcttttccgtttctgcatacagctatacagaagccatggaggaaatttccgtaccgtcctctatttgggaagcaccgaaaatatagccgagctgtaccatgaaatgagctccgacgctaccaccggctaccgggtactgggctacttcgacaccacccccaatgccaaattccccgccagttgtacctatctgggaaaaccggagcaagttatcagttacctggcacagcacaaggtgaaccagctttactgctgcctgccctcggcattgagcgaacagatcgtgccggtcatcaactattgcgagaacaacctgatacatttctacagcgtgcccaatgtacgcaactacctgcgccaccgcatgcactttgaaatgataggcagcgtgcccatcctcagcatccgcaaggagcccttggggaaaatagagaacagaatgttgaaacgcatattcgatgtaatcttctcactgctctttttatgcacattattccctattatattccttattgtaggagtgaccatcaaaatcacttctccgggtcccatattcttccgtcagaaacgtaatggattgaacaacaaagaattctggtgctataaattccgttccatgaaagtaaacaaggaatcggacaccttacaggccaccctcaacgatcccagaaaaaccaaattcggcgatttcatgcgccggaccaatattgacgaacttccgcaattcatcaatgtattgctgggagatatgtccattgtagggccacgcccccacatgttgaaacacacggaagaatattccaagataatcaataaatacatggtccgccatttcatcaagcccggtatcacgggatgggcgcaggtgaccggtttccgtggcgaaacccgcgaactggaagacatggaaggacgtgtgaaagccgatatatggtacatggagcactggtctttcctgctcgacctttatattatgtacaaaaccgtggcaaacgcgctgcacaaagacaagcaagcttattaaaacaagacctgaaaactgaaaaattttaaataacagagagccaaaaaaaatgagaagattaaagttgaccctattcgcgctggtttccctgctgctatgcagttgcagcgcctacaaaaaggtaccctacctgcaaggttccgagtacctgaacatggcaaatgtccaaacacccctgtatgatgcacacatcatgcccaaagatttgctgaccatcacggtaaacaccagtgaccccgatgccgccattccttttaacctgacggtagccacccccatcacggcaaacagcaaaagccttaccagccaaccatccctgcaacagtatctggtagacaataacgggaacattgatttcccggtcttgggcacactgcacatcggcggcctcaccaaaagccaggcggaaaacatgataaaggaaaaactgaaaacctatatcaaggaaaaccccattgtgaatgtacgcatggcaaactacaaaatctccgtgatgggagaagttgccaaacccggcacattcaccatcaccaatgaaaaagtaaatatcatggaagcgctcgccatggcgggagacatgaccgtatacggacaacgcaacaaagtgaaactgatccgtgaagacgcgcaaggcaaccgccgggtgattccgctgaacctgaacgatgccgacatcatcgtatctccttactactatctccagcagaacgatgtggtgtatgtcacccccaataagaccaaagccaagaatgcaagtatcagcaacagcaccaccatctggttctcggtagtaggaactctggtcgcactggccagcctgatagtaaccattgccaaataaacagaattatgaaagaagacttatacgacgacctttatctggaagaaaaagaagaaaagaccgatttcaaagcgattcttttcaaatacgccatccattggccctggttcgtggcatgcaccctgctgtgcatggcgggagcctggctctatttgcgttataccccgccggtgtacaacatctcggcatccgttatcatcaaggacaatgacaagaacagcaaagcaagcagcggcatggctgacctggaagacctgggcttctattcctccatcaacaactttgacaatgaagtggaaatcctgcaatcgcgcacgcttatcaaaaaagtggtggaagaactggatctttacatcagctatgccacgaagagcagtttccatgacatcgaactttacaaaagttcccctgtgaaagtatggattacccccgaagaagcccagaaactgcccgcccccgcgcgtcttcacctgaccttgcagccgggcaacaagctgaatgtgaaactccggataggagaagaggaatacaacaagcagttcgacaagctgcccgccttgctgaccaccccgtcgggcacgttcagctttacccctaaagattccacaaccgtccaaagcacgcaggaaatcatggctacggtttcttccccccgcagtgtggcaaacacttaccggggagcattgagcatagagcctacttccaaatccaccactatcgcacagatctctgtcaagagcacgcatacgcagcgcggcatggatttcatcaacaagctggtggaagtctacaaccgggatgccaacgatgacaaaaacgaagtggctaccaagaccgcggaatttattgatgaacgtatcaaaatcatcaacggcgaactgggaaccacggaacaggaactggaaaccttcaagcgcgatgccggactcaccgacttgaaaagcgatgcccaactggcattgagtgaaaactcagaatacgaaaagaaacgtgccgaaaacagcacccagctccggttggtacaattcctggccggctatgccaacaatccggatcatgcctacgaagtacttccggtcaatgtgggcctgacagataccggactgaccgaactgatcaaccgctacaacgagatgctgctggaacgcaagcgcctgctccgctcctctcaggaaaacaacccggtggtagtcaatctggatgccagcatccgcgccatgcgcagcaatgtgctgaccaccatcaacagcgtacaaagaggtttggccatcacccaggcggatctggaacgtcaggcaggcaaatatgccggacgcatcaccaatgctccgggacaggaacgccagctggtcagcatctcgcgccagcaggaaatcaaagccggcctttacctgatgctgctgcaaaagcgtgaagaaaacgccatcactctggcatctaccgccaacaacgcccgcatggtggacgaagcactggcagatgccatccccgtatctcccaaaggaaagatgatttatctggtagcactgattctgggaatcgccctgccggtagttgtcatctatatcatcgaactcttaaaatacaagatagagggccgcgccgatgtggaaaaaatcacctcccttcccattgtgggcgatgtacccctgtcggaagataaaggaaaagaagaaagcattgtagtacacgaaaaccaaaacgacctgatggccgaaaccttccgtaatgtacgcaccaatgtactttatatgatgaggagcgacgagaaagtcatattggttacctccaccaccacaggagaaggcaaaacctttatcgcttccaatctggctgtcagtctggctttattaggaaagaaaatcgtgatcgtggggcttgacatccgcaagccgagcctgaacaaagctttcaacttatcacacagggaacaaggcatcagccagttcctcgccaatccggaacataccgacctgatgtcgctggtacaagtttcacgcatcaatgccaacttgtccattctgcccggagggcctattcctcccaacccgaccgaactggtggcacgtgaatctttgcctcaggctatcgacatactgaaaaagcattttgactatatcattctggataccgcccccatcggcatggtgaccgataccctgctgatttcgcgcgtagccaacgccagcatctatgtgtgccgggcagactacacccacaaggcagattatactttaatcaacgaactgagcgaacagaaaaaactgcccaacctatgtacccttatcaacggactggacatgaagaaaaagaagtacggatattactatggatacggcaagtatggcaagtattacggatacggtaaaaaatacggttacggctatggatatggcactgaaaatgtaaataaaaagtaatttcaaaagtaattacataataccataagactaattctcttctgaatttgttaaaatattaacacattagaaagagaattagtcttattacgttttaatatataaatattatttactatatttttctttcgaaacatcaaaacaggggcactgtttcacccattcctcaggctctatctcgccatttccgttcaaatccggacttaaatcccgatgaccgcaaaccttgcaaccgggataatccaccagcaacgccctgaccagtacacgcaacgaatgtttctgccacaccgtccgcgtatccgccagcctgccccgctcactgattcccccctcatagcatatcccgatactctgcgcattatgtccacgcgcatgcgcccctattttctctatgggacgggttgtttttatatccccgttcttgcggatataaaaatgatatccgggtccgttcattccacgcctgcggtggcacacctccaaatcctgttcggtaaagtccctgtccgcctttgtggcggaacagtggacaacaatcagattaatcaccctcatccccctatgcacgagctgattcctactacacccgcaatagccgtagctactgcaatcaccactttcaaaatagtgctccaaacagatttacctttcatcctacagtttttttttaaaattaaacacttgtccgccatctacttaagcaggcttttgctcttccttcgttttcaccggcaatttatccaccttcgtatatttcagtgctgccagaataccgcttagcgcaatacccggacggaaattgatacgcgcttttctaatcatcgacacatcatacgcatcctccgtttccgcacctcttccgctcaggcctatctggaaagtgcccagatcggcaagccttacgatctcgcccccttccagagcctccataatcacatcctccaaggcaacaagcacagccattacatccgcacgcgtcaccgtacaggttttctgaatacgatccgccatttcgcgaatctctacatggccattggcctgagcttgtgcataaaacttaggcactgcatcctgatcaagcggattattacgctttaccaccgaataagaaactgttcttcccatactttttcaaattaaaaattaaaacttgcaaattaagaaacacactggtaatcgagcgttaaccactaagccggctatgattgacttttgattacactacaaagatacgatgaaccggaagccccgtgtagacatttgtagagaagcgtaggagattgtcgggaaatgtcgagaataacttacagagagagtaggaaaacaaggacattttgcgtatctttaccctataatcaaaacgataaaagaacatgaaccaagaagaaaaagcattcattatcagagcgtatgacaaagcggaactggcagaactatacagcccggggcgaactgccgcggcagccctgcaaaccctgtatcgctggatgcggagaaacatgctgctacaggaagaattgaacgaagcgggctacaacaaattccgccacagctttctgaagcatgaagtggcaatcatagtgaggcatctgggagaaccttaggacatacgcttcccaaagaacctgttgtctacatcgaaagaccttgttgtttttttaaaatcccctgttgttttaccggaaagatcctgttgttttttgaaaacaacaggatctttttcacctgcatttaaggctcacaaggctcagggctcacttaggcggttttctgagccaagatttgccggtctttctatacttaccatcctctttctcaacgatttgataatacaccaaacgcaacaaataacgtttcacggatgctgtaggcaacccggcttcattggcagccgccatcagctccgaataggtgaactcgcgcggcatttttttcaaaacgggacgcagtttgaaaaaagcctttaccggcctgattcttccggcagtatcatccatggaagtggaaagcagcaaactgtgttccagcaacacatccactatctgcattgccgtatggaaatcctcatccgaacacttccactccgatgtattccattgcggctcacacttacgcaatgcagtcagcaccatggcaatacgagacatcatcagtccgtggcgcagcacaatggcacccggagaatcatcatcttccgccactacctcacgcagatacgttctgaaacgctccgtatgctctttccattgttcctcggtgaaaaccacctcggtaggcgatccggagagaaagataaacatacgcagcagctcctcgcccatccctttgaaataagcgcgcatatccagccgggccttgccggggtttgccgacttatactcccagggggcctgtcccacatagaaagccacacggctgtacattccattctccagcgaagaaataaatttatgcaactgggcgggagtacccgaagcgcataatgccagatgagggtcactcacaacaacaagccggtgatccgtcttgaaataagaagacacctcctcgtgctgggaggcggcacgcatcacatcatcatgttttccatactcctggtgcatggcagaacttatcatgtccagctcggaggcattcatcaccaagccgaccgctccacccgcctccaaagccagtatcaactggcttttcgaaatattgggagccaccttcaggatgcgttccaccggcatctccgggcattggtccaaatcgggaaccctcttttcctgagcggcaagccgttcctccagattccacttcagcagcttctgccggtactcacgctcatccttcctgttcaattcatcgtaatactcctgaatggctgcgggcagaattgccgccagctgcatcaccccctttcctctgcccgaaccggccaaagccaccagatagagatcggcggaataaaccattcctccataattcatcctcacccccggcaggcaaccgctgatgttggtaatcatggagagcaacagaatatccctctcgcgcttgttgcggacgtgcgtcaacccacgcttcaaaaagtcgggcaaacggtcgaacagttcatccggaagacacggaacttcacgacgcaacttgtcagcctcaagtttctctaactcagcctcttcctccccctcattgggctcagaataccgcataggtgagccctgagccttgtgagccctgaaagcaggtgtttcgggccccttgttcatgtcggcataccggtatccggagtctatgcgcggaggtatatccccggcggcacaccccatacccgccagcctttccaccgccagcgttttcagccgtgccaactcttcctcgcccactcctttatagcgggcgatacgtcccagcttcaacaaaaactcattctttttgccatccacaaagggattctgctccaggaactcgttgaagaatgtgtgcagcatgcccgaagccgcaacgggaggcccggacgcacctgccggggtcttcactttcagctccgccagaatctcccccaccctgtcgggatgctccgtcacaaagcgccgccagggaaaaacttcggtatccggacgaaaaaaagcctccggatcatacgatgcaaagcaaggacgggtgggattcttgcaactcatgtcacagggaaaggcaagaagctgcgccacgtgccatgccaccaatgcgtatgccagacgatactcgtccacactctccgcttccacacgcaccaccagtttcagcccgtcgtacgaaacgctgcgccatgccgccttcacccaaggagtgtccttcaagacctgcaagaactcagacacacggccgttacatttatccacatccagcatggcgtccccgctccactgcttcagattggtttcggcatgactcccatcgcaacgcccggctatcaccagcgcggccagttttctctttaacttcttggcctctgtctccctgcccgaagccttcaggcgctgatactcttctacttgcaccttccagcgttcgccacgcagaagcttcacaaactcttccaatgtcatatccacggcatgttcatcgaacaccgagaaatagaaagagcataaatcggtataaaccattcatgtatgaatttaaattatcaaaaggagggcatttccctccaccatgaaagcaaaagtatattgcaaacccatacaatcaaaagttaaaattgtacacttacccaatgtaaagcactgatttacaacacccatttatgatacaagtgtacaaataaccgggagacttccttttaatgtcttttcacattttactccttatttcctttctttcctctttttcttctctttccgttctttcttcttcttttcctcctttttccgcagaaactcgtctatatcagccaacatacttttgcacatgcgcttcagaactctcatttcctcatcagtgtagccttcaccggacaggcgatatccggccatgattttttccaactcttgaaggaagctcaatctgccactatttttcttataaatcttgatttttccacaatgttaatatcatttaaaatataaaaagcacaaaagtataaataaatacgtcattcttgttaattttttcattttttgcgaacaaatagcttgttatcgtaaaaaaatgtctatatttgcatcagaatttaacgacaagcttacctgggaatgacacaggtaacagcgtagcgtgctcaagaggcatcatttctttcattttttagaacatctaacattacttttccttcctccgaatatgaaaaaatggctagtggcgtatgtccgccttcaccacgaaaagaagacggccgaacggctgaccgcaatgaacatagagaacttcctgcctgtacaagaagaaatccgccaatggacttaccggaaaaagaaaataaaacgggtggttatccccatgatgatttttgtccatgtagatgcggcggaacgttcacaggtgctcacgttgtcggccatcagccggtatatggtgctgcacggcgaacatactccggcggtgattccggacgaacagatggaacggttcaaatttatgctggattattcggacgaggcggtggagatgtgtaccgcgccattggctccgggagaattgatacgggtggttaaaggtccgctaaagggtctggaaggagaactggtggaagtggatggaaaagcgaaagtggtggtaagactggatttgctgggatgtgctggggttgatatgccggtggggtttgtggagaagatgaaataaggagggcggacgctaggaaatgtggaggggaatttgtagctttgcggtaagaaaggagaataaaggcatgcgtttgcaatctaaagaaatacagaccatcatccaaatagccaaagatatttatggtgaaacagtgcaggtatatctcttcggttcccgtctgaatgacgaaaagcgcggaggagatattgatttattagtccgcagcacgggagaaaagaagggtgtattggcacgcatccgcatgaccgcacgcttgaaactgcatttgggcgaccaaaagattgacgtcatcggtgaccatgaggattcaccggtagtgcaggaagctctgaaaaacggaatacaactgatatgacagaaaagaaaattcacagaattattctttgcttgaaacggatgttaccgtcattttgaatgaactgttttccaaaagtgccttcaaaggcaacagacacgcttgaggtgtgatacaggctattctttcccgaaacttttttctataacataaacttcgtaacaaagttatcgagaggaagcaaacgcatttagaagttcaccgttaaataagattttctctaccatctactaatttataaaaaagcagtcgctcgatctgtgaccgtatgaaaaagaggtaaggttcatatcctatcttgggtcggaatatagaattccataaagaaatggttaatattaaacaagattcattcgttggtaaatgaaacctgacccatcctgtaagagaaacttaattggaagaaattttctaaattcatattgttgactattagctcattaaaaataacattttttcttgaaatcagaaagatatctattaaacaaatagaagaaaaacttttaaaataaacattccatccatcaatgtctgacaattttaacaaaaatcgcttagctaaaaacaccattttactttatgtacgtatgctgtttacgatgtggttaaatttgtataccacacgtttaacacttgccaatcttggtgtagaggatatgggaatctatggtgtcgttggtagtattgtcagtatgttcgctgttttcagtggtggaatgggcaatgccgtacaacgttttctgacctatgaaataggacgtgataacggtgatccaaataaagtattttgttcttgcttaaatgtcatattcttattgtccggaatcatatttatactacttgaggtcggaggtctatggtttctacataccaaaataaacataccagcggaaagtatggatgcagcccaatgggtgtttcaaatatcagtactcacttgtatagtcaatcttataagtattccttataattcactaatcgtagcacatgaaaaaatgaatgcttttgctgctatcagtattcttcaagtaatcttaacatgtgcttcagcctattgccttagttactttcctaccggccgtttattaatctatgctatattgatggcaacaataagcatattaataagaatagcttatcagatatattgccatcgcaaatttccggaagtccattaccatatgattatagacaaaaaccaaataatgcaaattggcaaatttgccggtatatcctctgcttccggtgctttgcaggttctttcgtcacaagggtttatcctcgttatcaatcttacattcggggtggctattaacgctgtatatacaatttcaatgcaattgaaaaactcagttctgtcatttgctcaaaatttgcaacgtgccattgctccacaaataacaaaaacatatgccaatggtgagctggatatacataaaaagcttgtctatgcaggaagtaaatttcaagtatttcttattttttttataatgataccatttctttttcaaacggaatatatcatgcacctctggctaggtaatgtgccaccatatgctgtgacttatgcacaatgcaccatatttctgagtcttacctatgcttcttttgaaacaatacgaacagcagtatatgcaaccggtaatattactaaatttatgatatggcccgaagctatatatttattagttttgcctatcagctactatgccggcataataaccaatgatcctaatgccctgataatagcaatggtattgtatgaaatatttgtttgtacaatacgagtatggatagcatcaaaagtttcaatcataagaataaatgaactgcttaaaaaagtaatcaaaccttgcttctgcgtagcagtaccagcattgtttatatgcaaaataattacattgtttattccacagactatttgggggctaatctcgattctctgtttaaacagcatttcattaagtttaatcattataataatcggattaagcaaacaagaaaaaaatatgataagtacattcttgaagaataaaatgaaataaatagcaataacatatatactttctgattattgccaattagtaccaacaattttagaatcaactccttttttttgacttatttcaaacggaatcaactttaagatagactccatatgatcatatgtcaaaattaagtttataaaacaaagatatta

SEQ ID NO: 620 - DNA, 1182242 bp, Phocaeicola vulgatus
  source 1..1182242: mol_type = genomic DNA
ttatttcttttagtttatcgtattgcaatcacaacaaaaaattatcatgttcacaaaacgataaactttattaagaagataaggctatattcacttttgaaaatgattcttcttcatctttataagagataatgtatagacaatagagttaattatcttttttgacattttttcaagtctcgtataattgtacttcccataacttctccataaatttgtgttgtagcaaggtttttatgccctaataatttttgcacggttgttatattagcacctttatatatcaataaagtagcattagtatgccttgcagaatggaatgaaaagtgtttgcttatttttgccaatttgccaattcgtatcagctctttatttacacttgagttatttttaattgaaaaaaatgagctccattttccctggtatttttgtaataaagttaaagccttgccttcaaacagcaagtttaaaggcaatttcacttctgtacctgttttgacagagtcaaagattagccataattttccatccatttttacgatatttttctcattcaaattcacaaaatcagaataccgcaatcccgtatagcagcaaaataaaaatgcatcaagagtatgttccagacaactatttcttcctgtcaaagacacttcttccaatcttttcatttcttccggtaataaaaaaacatgttttccttccttcattttaattttatatcttctgaaggcatagttattgggatcaatgtatcctttattaattgcagcattaacaaaagatttcaaatgcttcatatgcttggctactgtatttgtttgatatccagattcataaagaaatttttcaaaatccgtaacgaaattataggttaagtcttcaaactcaattgtcggtttgaacgattgtaaaagggatattgttgttaaatggttgcgcttagtgctatcttttagctgagaagacattatttctttacgcgcaaaccctaagaatgaagcatctgtattcgatttgaactcttcttttatgaggcttaaggttattgtctttccttgcctccacaaacttaattcttttttctctaattcaataataaattcattaagcatgccattcagcgcatcttggttaggatgatctttgatgattttcctttttacatcccattgttctggccgtaaataaacatgtgtggaaaaatacactttctttttattcaagtaggcttcaacttggaccaaagcggtccctctgtcatttaaacttttttttcgattgtaaacgaaacgataactgattttcctcataatttaattctttaattgaaattctataataagacgcaataaagaaaagtagaaaagcattatcctactattttgttctcatctttatatttattagacgattcgttaacatttataggttaatgtatgtttacctgatcagttataaattgaaagtttctctttttaacgacttaaaaaaaagaataaatatgaggtttattttcgtcttttgtgagttttaaatgcctaaaagcataaaaatatagcagtttagtatgttttttacaataatttgtttgatattacaattttattcatacctttgtcatttgttagagtgaatgaatttatattaatgtaaagttaaactttaagagagaattttatgaaaagaaaattaatgctgttattgacctgcctttttgtaggtataggtttggtaaccgctcagatcacgaaggtaacaggtactgttatttcggaggaggacggattacccgtagttggcgcctctattttagtaaaaggtactactgtaggtacagttactgacatggatggtaaatttacattatcaaatgttccaagttccgcaaagactttggtagtttcctttatcggaatggctacacaagaagtgccagttaaagcaaacttgaatgttgtgttaaagtctgatacagagcagcttgaagaggtgatggtggtggcttatggtacagcgaaaaaatctgcatttacaggttcggctgctactataaaaaatgaaaaaatagcgacgagacaaacttcaaatgtgacaaatgctttggcgggtcaagtagccggagtacaaactacgagtaataatggtcagccgggcaaagatgctgaagtgcgtattcgtggtattggatctatatcggctagtaacaagcctttgtatgtggtagatggagttccgtatgatggtgaaatttctgctatcagtacttctgatatagaatcaatgacagtgttgaaagatgctgcttctaatgctctgtatggtgcacgtggtgctaatggtgtaatcttgattactaccaagcgtggtaagagtggggaagcccgtgttacttttgacgctaaatggggtgtgaataaacgtggagtacctaattatgaaacaattacggatccggctacattctatgaattaaactattcttctatttataatgccgatttgaaaggatatgcggcagccggagatttggctaaagctaatgcgtacgctaatcaagcaatgctttcttctacatatttgggatatcaggtgtattccattcctcaaggacagcaactgatcggtatggatggcaaattgaatcctaatgcgacattaggttattctgatggtacatattattatactccggataattggtcggatgaaatttttgaaaataacctgcgtcaagagtataatttaagtatcagcggtgcgactgaaaaaatgaattattatatgtcggccggctatttggatgataagggaattgttcctaactctggtttccaacgttattctgcacgtttgaaagctgactatcaagtgaagccttggctgaagatgggaggaaatgtatcatttactcattatgatagccgtgaacaggatactgagggtggtacatcaaatgcaaacatcttttatgcatcaaatattatgggagccatttatcctatgtatgttcgtgatgcacagggcaatattatggtagataatcgaggtttccttcgttatgattatggaaagccaggacaagattcaaatggtagccgtaatacgattcctaatgcaaatccgttggctagttatatgctggataaaatgaaatattcgggtgatgtggttagtggaaaatggtctgctgatattgatatttggaatggaatcaaggcaaaagtgaatataggtgttgatgtaaataatgtgcgtgctacagagatggttaaccccttctacggacagtattctgaaactagcggagtcggaggtttgatcggcgtatctagtgagcgtacatttagtgtaaatcagcagtatttgttgacatacaacaaaacatttaatgatgttcataatgtggatattttggccggacatgaaagttatgactataaatatcaatatttgtacggacaacgtgagaaattgtatgatccgaatgttcctgaattaggcaatggtattatgaaccagagcaataattcatattctcgtaattatgcaacagaaggatggctgttccgtgcacaatatgactatgatggacggtattttgtttcagcttctttccgtcgtgatgcttcttcttgttttcacccggataatcgttggggtaacttctggtctgtaggagctggatggttattaagcaaagagaaattcttggaaaaccagtcttggattgatatgttgaaatttaaaatcagctatggtttgcaaggtaatgataacttgatgttccaaggtggtttgtaccgtaactactatccgtatcaagaccagtatacattggcaaacagtaatggcgatttttcaacttctctatattataaaggtaataaggaaattacttgggaaacttcacacagctttaatactggatttgatttcgctttttggggtggtaagttaggtggttctgttgagtacttctcacgtaaaacaaccgatatgctttatttcaaaccggtagcagcttcaatgggttattcccgttttcctgagaatgtggggtcaatggtaaaccgtggggttgaattggacttgtattccaatataattgaaaacaagaatttttcctggaatgtaaactttaatcttacacattttaagaataaagtcttggaattatctccagaactgaatggacaattgattgacggtgcccggatttatcgtgaagatgagtctatgtaccagctttatttacctaaatatgtaggtgtggattctgaaacaggagagagtctgtgggcgctggtgactccggatgagaatggtaatacagttacgaaatcttattctgtcgcttctgaaaacagattcgcatcaggtgatattctacctaaagtttatggtggttttggaacaagtgttacagcctatggctttgatctctctgtttcgtttgcatatcagcttggtggacgtattctggactatacttatcaaggattaatggatgtggcagccacgggtagtgctttgcataaagatatgttaaaagcatggactcctgaaaataaaaatacggatgttcctcgtatgaatattaatgaccaatatacgaacagattaacagatcgtttcttgactagttcggattatttaagcttgcagaatattacattgggttatactttgccgaagagtctgacacgtaaaatgcagattgacggtgtccgtgtattctttgttgcagataatgtggctttgctgacagctcgcaaagggttggacccacgtcaaggttatgtggctgctgacaatgtatattcacctatccgcacaatttccggaggtatatctttaaatttctaatttagcaacccatttttaagaatatgaaattgtcaaataaatatatagcatttgcaagtgtcgctttattaatggcatcttgcgatttggataaatttcctgaaggagattacatatctgaagaacagaaagaagatataatcaatggcagacctaatttgataactgctgaagtgaacgctatggcagccaaattaaatacttttggtacgatttcagatgatgccactacttatcataatgactatggtattcctgcggtatctatgatattggaatcaggagggcaggatttggttgcattggttaatggatataactggtttaatacatctcagaattatagtgacagagtatacgatagttcaagcgatgaattgatttggaaaacgttctataatcacttgaaagctgcaaacaatgtattgaaattgatagcggcagatacggaagattcttctttgaaggtttatcgtggccaagctttagctgctcgtgcttatgactatctgaacttggttcaaatttatcagtttacttatgcaggtcatgaaaatagcctggcagtacctattgttacagaaacaatgactgatgaagatatgcagaataatccgcgtgcaactgtacagcaggtgtatgaccagattatgagtgacctgaatacggctgctgatttattgaccgggtatgataatggctcaaacaaagatcagattgatgaggcagtagtttatggattgcgtgctcgtgctaatctgttaatgcaaaaatgggcggatgcagctaaagatgcagaacgtgccattgctggcggtacacctcagactttagcccaggtatctactcctacctttaattcagcatcggcaagttcatggttatggggagtgatgattacgcctgataatgatgttgtccagacaggtattatcaactggccttcgcacttgtgctcttttaccgggaacggttatacttcaggagtgcctgatggatatagaaaggtgaattctgcattatatgatttaatacccgaaacagatatccgtaaacaatggttcttgtctccggataataaatcttcattgattgataatgagcagattgagggtacttccatcgttgaatattttggtttgactccgtatgtaaatacaaagttcggagcttatcaaagtatatttggtaacacaaccaatgcgtcagactggcctttgatgcgtgttgaagaaatgtatctgataaaggctgaggcagaagccatgggtggtaatctgagtggcggaaagagtacattggaaaattttgtacggacatatcgggatccttcctttacaagtaaagctaattcggcacaggattttcaggatgaggtttggttgcagcgtcgtatggaactttggggagaaggtttctcactgttcgatatcctacgcttgaaaaagccggtggttcgtaagaatacgaattatgacccgtctgtacaatataattcagcagcagaagcgcagatcctgatctatcggattccgcaatgtgaaatggaaaccaattccggaatcagtgacactgataacaatccggctgctccacaaccacaactatagggaataactgtaataaaaaagaggatgacgttcaacgttcatcctctttttttgttatatttgtcgcgaacttatttagattgatagataaatgaaagaatttgtaatttctgaagcacaggttgaaactgccatcttagttggtttgattactcagacacaagacgagcgtaagaccaaggagtatttggatgagttggagttcttggccgaaacggccggagcaacagtggtgaaaaggtttactcagaaactgcctgctgccaattccgtgacttatgtcggtaaaggaaagctggaagaaatcaaggaatatattcatcaggaagaggaaaatgagcgtgaagtcggaatggtgatttttgatgatgaactttctgccaagcagatacgtaatatagaagctgaactgaaagtgaagattttggaccgtacttcgctgattctggatatttttgccatgcgggctcaaactgcaaatgctaaaacacaagtggaactggcccaatataagtatatgctgcctcgtctgcaacgtttgtggactcacttggagcgtcagggaggtggatccggtgctggtggaggtaaaggctctgtgggattacgtggcccgggtgaaactcagttggaaatggaccgtcgtatcattttgaatcgtatgtcattgttgaaagaacggttggttgaaattgataaacagaagtccactcaacgtaaaaaccgtgggcgtatgatacgtgtagctttggtagggtataccaatgtgggaaaatctactttaatgaatttgctttcaaaaagcgaggtctttgctgaaaataaactttttgcaacattggacaccacagtacgcaaagtgattattgagaatctgccatttctgcttacagataccgtaggatttatccgtaaattaccaacggatttggttgattcctttaaatcaaccttggacgaagtgcgtgaagctgatctgctgattcatgtggtggatatttctcatccggattttgaggaacaaatttctgtggttgataaaacgattgctgatttgggggcaggtggaaagcctaccatgattgtttttaacaagatagatgcttatacctatatagagaaagcagaggatgatttgactcctaaaaccagggagaatattacattggaagaactgatgaagacatggatggcaaaattgaatgataattgtatcttcatttctgccagagagaaaataaatatggatgaattgaagactattatatataataaggtgcgcgagctacacgtacagaagtatccttataacgattttctttatcaaacctatgatgaagaataaatacatatagaagatgaaaacttatcgttcacttacacaagaagaaatacaacaattaaaagagagatcatgcactgcggttgattgggatgaaattgaagtagtagagaactttaagacggactatatttatcatacccgtttttccggaaaggtcagattgggggtctttgaggatgagtttacgttggcaggtggcatgcgtaaacattccggattgtatcatgcgaccttgcataatgtaacggtgggcgataattgttgtattgagaatataaagaactatatagccaactatatcattggggattatgcatttatagagaatgtagatatcattctggtagatggccggagcaagtttgggaatggcgttgaagtagctgtattgaatgaaacgggtggacgtgaagtgcctattcatgatcgtctgtcagcgcatcaggcctatattctggcattgtaccgtcatcgtcctgaattgatttgccggatgaaagccattattgaccggtatgctgaagagaatgcttcggatacaggtactattggccaccatgttaccattgttgatgcgggatatataaagaatgtacgaataggtgattattgtaagatagaaggggcgggacgattgaaaaacggtagcttgaacagtaatgagcaagcgcctattcatatcggctatggagtggtatgcgatgattttattatatcaagcggctccaatgtggaagatggaactatgttgacccgttgctttatcagccaggcatgtcatttgggacataactattctgcatctgattctttgtttttcagtaattgtcaagaagagaacggtgaggcatgtgccatttttgccggaccctttacggtgactcatcataagtctactttgctgattgccggaatgttctcttttatgaatgcgggttccggctctaatcaaagcaaccatatgtataagttaggtccgattcatcagggagctatggagcgtggggcgaagactacttccgattcttatattttatggcccgcacgtgtaggtgcattttctttggttatggggcgtcatgtgaatcatgccgatacttctaatctgcctttttcttatctgatagagcagcaaaataccacttatctggtgccaggggtgaatttgcggagtgtaggtacgattcgggatgctcaaaagtggcctaaacgtgacaaacgtaaagatccgaaccgtttggatcagattaattataacctgttgagtccctatactattcagaaaatgatgaaagggcgtagtattctgaaagaattacgtaaagtatccggagaaacttcagaaacttactcttaccaaagtgcgaaaattaagaattcttctttaaataatggcattcgtttttatgaaacggctattcataaatttttgggtaattcattaatcaagcgtttggaggaggttcgttttagcagtgatgaggaaatccgtgcccggttgattcctgatacagagatagggacaggagaatgggtggatatttccggattgatcgctcctaaaagtgaaatagagaagttgatggcagatatagaatctggaatcctgactaatgtggatcagattcatgaccgttttgttgagatgcatcgtaattattatacatacgagtggacatgggcgtatgggaagatgcttgagttttataatctgcgttccgatgaaataacggcaaaggatgttattgctatcgtgaagaagtggcaggaggctgttgtcggattggataaaatggtctatgccgatgcgaaaaaggaattttctttgtctgctatgacggggttcggtgcagatggatcacgtgaagaaatggagcaggattttgaacaggtgcgtggggtatttgaaagtaatccgtttgtgacagcggtattgcagcatattgaagcgaaaacagcgttgggtaacgagttgatagaacggattgcttctatatgatatttttgatgagagtatccagactaagatgaaccttcggaaaagttacagatggtagttacatataaaaagagccgtatgaatgctggagtagtcatacggctcttgctattggatgacatttgagcttgttgggatacttcctttttatttttttaccacaggtagtataactctgcttgcagctccttgctgatgataaattttgatcttttgtttcatcacaaaatcttctaccgtacaatgataggtatcaataaacctttgtggattgcggtcaataatggggaaccaggaactttgaatttgaatcatcagtctgtgtcccggcaggaatgtgtgtgccacatcatacagtgtgtaattaaccggagttatttcttccggtttgaaaggcagggaattgtcgaatcccttacggaagcgtcctctgaataattcgccacgaatcatcagctggtacccactcattgggtagtcactctttaaataactgcgtgcagttttggaatattcaaatttttcaggatatacatcaattactttcaccataaaatcagcgtcagtactactgatggcagtcattaattccacttctataggaccggccaatgttaatgtatcacatagcggctccgtcatgaaagtaatgacatcgggacgtgaagtagcaaagcgttggtcatctaccatgaattcttttgtccggtaagtggtagggtttgccgtatagggtaccggacgtgacatatctgaaatatattctgaataagactcttgttctgccggtgcttgtgtggatactgatccgttcttatgtatataataaggtgtaccggcagtcttttgtacaggccattcgtcgtatgttttccattcgttttcacctgtatggaatatatttactttatgcttgggcttttctccctttccttccaggaaatatcggaaaaaaggatattctattttgtccatgtaataagccgaagtgcttttaccgaaatacagattaccgaaaccttggaacccgcgtactgtccatgctccatgccaccaaggaccgaatgtcagatataaatctgtgtccggtgattgctctttgatggctttataaagattccaggctccgtaacagtcttcggagtcatacagtccacctaccaccaatatggcgggcttcaagttataacaggaggtgcgtgcatcgcgctctttccagaaatcatcgaaatcaggatggtttttgatatcattccacaatgtctgtgtggtatcacgtaccaggtcgtctacattcttaaaggtaccgagtgccagaaaatctgtgtaaacatcattctttacaatttggttcatcactccttttcccatgtggcgtccttccagtctgggaaggaaattagtggtttgcagcagggtgaaggctccgttgtgatgacggtcatctccacggaaccagtcagtaacgggagcttgcggagaaacagctttcaaagccggatgattggaggaggctgtcatagtggcatagaaaccatcataactgattccccatgttcctacatttccgttattatatgtgttgtgaatcaaccattctatggtatcgtatgtgtccgtagcttcgtctatattctttttatctttcttaccctttttgtttttgttgagagggcgtacttggataaatattccttcactcttatgtcgtccacgtacatcttggaagacgataatatatcggtgctctatatagtttttcagattagttctgaaatgacggtcaaatccttctccgtatggggaacaagagtaagggctgcggtgcatcaggataggatgctgcctgctgttgtctttcggttcgtagacagcggtgtaaagcttgattccgtcacgcatgggaatcatgacttcccgtttcgtgtagatttccttcagtttgagttcgatactgtccggttggttttttgcttgggtttgtgtccatcctcgagggatgagaaagcataacagtaatgaagtaataaataagaatttgcctaatcttttcatgtataatgtgatgttattttaatgagttggcaaaggtaaggacattccttgaaagttttcacgctaattaaggaaaaatttcgataatagttactacctttgtcacactaataacttttaactaaaataagtatcaatatggcaacacctccgttccactatcagcacatgttcccgttgggacctgataaaaccgagtattatttgctgactaaagattatgtgtcagtaagtgagtttgaaggaaaacctatcttgaagattgaaaaagaaggtctgactgctatggctaacgctgctttccgtgatgtttctttcttgcttcgccgttcacacaatgaacaggttgctaagattctgagtgatcccgaagccagtgataacgataagtatgtagcattgactttcttgcgtaatgcggaagtttcagctaaaggcaaattacctctttgtcaagatacgggtactgctattatccatggtgagaaaggtcagcaggtatggaccggctattgtgatgaagaagccctttccttgggagtttataagacttatacggaagaaaatcttcgttattctcagaatgctcctttgactatgtacgatgaggtgaacaccaaatgtaacctgcctgcacaaattgatttggaagctactgaaggtatggaatacaagttcctttgtgtgactaaaggtggtggttcggcgaacaagacctatttatatcaggaaacgaaagctgtattgaatccggctacattggttcctttccttgttgaaaaaatgaagactttgggtacggctgcttgtcctccttatcatattgcatttgtaatcggtggtacatcggcagagaagaacttgctgactgttaagctagcttctactcactattatgacgagttgcctactaccggtaatgaatacgggcgtgctttccgcgatgtggaactggaaaaacaagtattggaagaagcttataagattggcttgggtgcacagtttggtggtaagtatatggctcacgatgtccgcatcatccgcttgcctcgtcacggtgcttcttgtcctatcggtctgggcgtttcctgttctgctgaccgtaatataaaatgtaagatcaataaagatggtatctggattgaaaagatggatgataaaccgggtgagctgattccggcagaactccgtgaagccggtgaaggcgatgtggttaagattgatttgaaccaaccgatggcggatatcctgaaagaattgaccaagtatccggtagctacccgtctgtcattgaacggaaccattattgtaggtcgcgatatcgctcatgctaaattgaaagagcgtttggatcgtggcgaagatttgccgcagtatatcaaagatcatcctatctattatgccggtccggcaaagactccggaaggtatggcttgtggttctatgggccccactacagcaggacgtatggacccgtatgtggatttgttccagtcacatggcggtagcatgataatgttggcaaaaggtaatcgtagccagcaggtaacggatgcttgtaagaagtatggcggtttctatctgggctctattggtggtccggctgctatccttgctcagaataatatcaagagcattgagtgtgtggaatatccggaattgggtatggaagctatctggaaaattgaagtggaagatttcccggcattcatcttggtggacgataaaggtaatgacttcttcaagcagttgaagccgcgttgccttggaaattgtaaataattaaattattccgtaataatactaatacagccttcctccctttaaaggcgagggggctgttctgttttttatttaattggtgttatccgttaccttaataatatgatgaaaaaactacgattgttgtttgtgctgttatggatgacaagcaacttattttcttctcctgttacaggattattagagcgcatcgacaaaggagcttcctccaaatttattattgaacgtcagaaatcggaaactgatttttttgaactcgatcagaaaggtgataaagtaattatccggggtaatgactatgtaaatattgctaccggattgaattggtatttgaaatattatgcaggcatacatctttcttggaatggaatgactgcaaaactgcctgctgttttgccccctgtgactaaaaaggaacggcatgaaacggatctgccctatcgttatgatctgaattattgtactttctcttattccatggctttttgggactgggagcgttgggaaaaggagatagattggatggcgcttcacggtatcaatctttccctggcattgacagggactgagtcggtttggagaaatgtacttctaaaactgggatatactaaggatgaaattaatgaatttgtagccggaccgggttttacagcttggtggttgatgaataatctggaagggtggggaggacctaatcctgaaagttggtatacccgtcaggaaaaacttcagaagaagattgtaaaaagaatgcgtgaatatggcatcgaacctgtgttgccgggatattgtggcatggttcctcataatgcaaaggagaaattaggattgaatgttgctgatcccggattttggtgcagctatcatcgtcctgcctttttacagccggaggatgagcgctttgaagaaatctctgctttgtattatagagaactgacaaaactgtatggaaaaacaggtttttacgctattgatccgtttcatgaagggggaagtactcaaggagtaaatttggatgcagccggtaaagccatcatgaaagccatgaaaaaaacaaatccggatgctgtgtgggtggctcaggcatggcaggacaatcctcgtactccgatgatagagcatctggaagcaggagacctgttagtcttggacttgcatagcgaatgccgtccgcaatggggggacccggcgtcagagtggtgtcgcaaaggaggatacgggcagcatgagtgggtgtactgcatgttgttgaattttggtggtaacattgggcttcatggtaaaatggatgcgctgattgatggcttttatgacgcgaaagcagatgttcatgccggaaggacattgcgtggagtagggatgactccggaaggtattgagaacaatccggttatgtatgagctggtgatggaattgccatggcgtgaacatcggtttactcgtgatgagtggttgaaaggatacgtatatgctcgttatggggtagaggatgaggctttgcaacaagtttgggatttattaggtaacggtatttataatagtcccaaggagaaaatacaacagggaacgcatgagtcggtattctgcgctcgtccggggttggatgtatatcaggtatccagttggtcggagatgaaagaatactataatccgcaggatgtgatagaggctgcccgactgatggtttctgtggctgataaatatcagggtaataataattttgaattcgatttggtggatgtgctccggcaggcattggcagaaaaggggcgtttgatgcaaaaagtggtaacggctgcgttccgggcaggagacaagcaagtatttgagttggcttcacagcattttctgcatcttattctattgcaagaccagttgttgggtacccggaaagaattcaaggttggaacttggattgaagcggcacgttcagcaggacagacccaggaagaaaaagcattatacgaatggaatgcacgtgttcagattactacatggggaaatcgtgtagcggcagatcaaggcggacttcgtgattatgctcataaagaatggaatggcattttgaaagatttctattttatgagatggaaggcttattttgattatttagcttgtgtcctggatggaaagcaaccggaggaacttgatttttataccttggaagaagcatggactaaagaaacaggattctattcctcaattcctgaaggaaatactgtggtagtagctaaaaacatttttgaagaagttttttaaatgttctttctactatggataacttaagactttcataggttataaggcttgattatgggttcagaaccgatgggtatgaaactatgataactttattcacggtagggggtggattgaatttaccccttacggtgaatgaaagttatggaaatagatagcgtgtggaaaacgcttacttcttcttctcggatgtctgtttccagatacgtaccatatagaatgcgcaatgtgtgaacgcaaagacgaacgaaatagcgagcaatgtcttgtcttcttcccagcctactgtctgttgatgccacaatcctgtaataactgaaagtacagacagggcgattcctgtcatattcaatatggtgagtcctttgcgtcgttttacgttatgctccagcttgctgtgttttactccatagcaggcataaacatccagacctatcagcatccataataccaatcggatccaagtgtcagccggaagaaacaacatcatacaaaggcaggtaaggatgcctaaaatcggtaccgtgggaacaaaaggagttttaaaggcacgatgtacgtcaggcatacttttacgcacgatcaatactgccgcgcaaaccaatgtgaaggcgaataaggtacctatactggtcatttctccggctacacgtgccggaacaaatgctgccagccctcctacaatgaccatgaataacaaattactgtgtgccggtgtccggtatttctcgtgaatctttgaaaagaaaggaggcaacagtccgtcgcggctcatacttagaaatacacggctttgtcctagcaaagttaccataataaccgagcagtaaccaaacaggatagccagtacgatggcccggttcaaccacggataatccggatgaattactcctgtggcatctgcatgtcccatgtggtcaatcgctacggcaacaggtgcgataccttgttgtcctgcaaagtcagaataatgggcaactcccgtcattacgtaagcaaacaccatataaagaatggtgcaaatcagcagggaacctagaatgccgacgggcatatcccgtttcggattttttgtttcctgagcggctgtacttacggcatcaaaaccaagaaaggcgaaaaatacaatcgctgctccacgcaatacacccgagaatccgaactcgcctaaagtaccagtattggcagggatataaggaacataattctctgcattaatgtatttccatcctaatacaacgaaaataagaatcactgccactttcaggaacacaatgaagccgttaaagatagaacttccttctgttccacgaatcagaaaaatactcatcagcactacaatcagtgcggccggtatattcacaatacctccgtcccagggacaagcagcaagtgcatgggggatatttatccccactccttccagaaaaacaacgagatatctgctccagctgatactgacggtagtagcggcaacagtatattccaatactagatcccagccgataatccatgctataagttcgcccattgtagcatatgagtatgtataagcactacctgctacaggtatcatggaagcaaactcggcataacataaaccggcaaagcaacaacctattgccgctatggcgaaagataaagtaatggcaggccctgtgtatcctgcggctactgttccggtgatggagaataatccggcaccgatgataacacctactcctaatgcgatcaagctccatggtcccaagactcttttcagggtcttgtttccagattcattggcttcggcttgtaatgcagcaaaaggcttcttgataaataatcccatatctttttacaacatatttagtgataattgtgtgcaaaggtacggataactgccctgaattacaagctataagtaaaggctataacgattattcgagatatttcgttattcttccacttagttggagcagggaaatttcacagactttggtgttatattcagcagacaaaatacgttcttccgcatcaagcaggctcttttgggcttcacgcatctcgataccggagagatctcccaacagataacgttctttggctatttcatggttttcacgggcggcaaccagattctggcgttccaaatttaataaacgtaaattattgcgataggcctgccacagattgcttaaatccgctttcaagcccaattccagctgttctctttccagttgcgagttacgtatttgcaggctggcattgcgcttttcacggcgacggttaccatcccataggttaatgcctacggtaattcctccgtttagtccccaattgcttctccggctggtggcgtttgtttcatatttgttgaatgtatagccataaccggcgttcaatttcacatagggataattacgggatagaacctgacggtaatccaattgggcaattgttgtattttgatcagctttcagcaggttggcattcgtcttgagggtggattcccataattcatcgtaattcagcgcatcattcactgttataatggagtcattgacacgtagcggtcggttgacttcctgtacggccattaactcgttcaggttgatacgtgaggtaaccaccagttcctgttgtttcatatattgtgcactgtctgcattgaagtccactttggcttgttgataatccagccgggaaaaattaccgatatggtatcgttcttctacaatgcgcaggcgttctttggataaagacacagcgtaaaggaagttcttcagacgtatttcctgttgtacataattatagtattcggcagtgagtcccgctatgaagtcttcaagggtaatacgcgtgttggtttctccctggcgttccagttccttcagttttttgtaggtggtgctgatattgaatccgtcgaacagagtccagtttacatccagtccggcctttaaggtttggtcgtagatgtttcgttcactggctgtagtgcctgtacttctactcttggtatccgtattgtccaacgttcctgtatatccggcagacaaatcaacagtcggcagataaccggcatttgctaatgtggcattgttatggctgatctgttcttcattacgggtgatacgtatggaataattgtttgcaagtccttcctccagacattttttcagcgtataaggatattgcgcataggtggaagccacccatgcagtacagatacataaagttataatgattcgtttcatacagtttctgttttaacgtttcggttggtagatatataactataaatagccggtacgatatacatggtcaggaaagtagatactaacattcctcccacaacagccgtacccatggcgatacgttggttggcgccttctcctgttgcgaatgccagcgggatcaagcctaatacggtagaggcacttgtcatgagaatagggcgcaagcgttgcaaagcggcatcccgtatggcctgcatcttgttttcaccggattcttgtttctgattggcaaattccacaatcaagataccattctttgctaccagaccaatcagcataataataccgatctggctgaatatgttcatggtaatgccaccggcatacatgaaaatcagtgctcctgcaatggccagaggaacggtaagcatgatgatgaaagggtccttgaaactttcgaactgtgccgccagaataagatagataagtatcaatgccagaatgaaagcaaacatcaggctggatgaactttcccgatagtctttggagtctcccgacaaggcggtacggaaagtttcgtccaaagtctgggcggcgattttatccatttcttccaagccttgtccgatggtctttccatctgccagtccggcagatacggtagcggaaataaaacggttgtagtggtacaatttaggaggagctacggattctacaaattctaccagattgtccaattgaatcatttcccctttgtcgcttcgtatgtaaatagatttgatattggccggtgtattacgttgttggcggtttatctgacccaaaatctcatattgttttccattcatataaaaatagcccatacgttgtccgctgagaccgtattgcagtgtttcggctatatcacgcacggtggctcccattgtacctgccttatcacggttaatattcactctcatttccgggctgctgaacttcaggtccacgtccgccatctggaaagtagggttgtcatatactttgcttaaaaaagccggtaatactttctccagtttttctatactgacagcttgtagtacatattgtacgggcatacttcctctccgtccgccgaaagaagactgttgttgcacaaaggcacgtgctttcgtcttgttgcggatggcctgtgagatacgttcggcaacttccatctgggtgtaatcacgatctttgatatctttcaatgtgatacgtatatttccactgccactggaaacacgtgcggttacagattcggcatcaggtataatagaatctaccagattgttgatatcttccgtataatcacggatgtattcatagctggcgccttcggctgcacgggtattgatacttatttgcgaccggtcttccatcggagccatttcagcgggtatctggacccaaagtactccgatggctatcaacataatcactgtaacaggtattgcccatatgcgtcttttaagaaaagcgttcagtgaacgggcatatatgcggttcataccttcaaagaaaggctctgtcttttggtagaaccatccctgtttttcccgttttatcaatagcttggttgccagcataggggtgaacgttaatgcggcaaaggaagaaatgacgaccgaacctgccacaacgaaactgaactcacggaacagacgtccgctggttccttccataaatacgatgggcaggaacactgccaccaaggtgatagtggtggagataacagcgaagaaaatttcttttgccccttctattcctgcttcgaacggacgcatacctcgttctatgcggatatagatattttctgtcataacgatggcgtcatccactaccaaacctacggacaataccaccgccagcatggtcagcacattgatggagaaacctgctatgtacatcacaaagaaagctccgatcaatgaaaccggaatcacgatgcagggaatcagtgtcacgcgccagtcgcgcaagaacaggaaaatgatgatgataaccagtacgaacgcttcatacaccgtactttttacttcatcaatggaagcgcggataaacttagtgttgtcaaagccatagctgtatttcacatcgtcgggcaagtccttcttcatctgctccatacgctggtatacggcatcggcgatttcgatatggttggcaccgggttgtggaatgacaacgacacctaccatcggcactccgttcattttcatgtaactcttgatatctgccggacctagttcggcgtaaccgatatcgctgaaacggaccactcttccgcctacttcttttaatatgatgttattgaattctttagcggtgtgcatttgtcccatggtgcgtaaggtcaattctacggtattaccttcaatgctgcccgaggggagttctatattttcattggttatcgcgttctttacatctaccggagtaataccatatcctgccattttggtggggtcgagccataggcgcatggagtaacgtttttctccccaaatagatacgctgcttacatccgaaatggtttgcagttgttcttttacggtcaagtctgctatttcactcagttccaacagagagcggctgtcactttggatagctaccatcaggataggcgttgcatcggcatcagccttggatacagtaggagggtcacagtcgcgtggcaggtaacgttgtgcgcgggacactttgtcgcgtacgtcattggcggcagtttccaaatcgacggataattcaaattccactgtgatacggcattgcccttgttggctgacactggacaaagaacggattcccggaataccgttgatgttttgttccaaaggctcggttatctgattctcgattacatcggcattggcacccgagtaactacaggtaacagagatgatcggattatctactgaaggatattcgcggactcccaatgtattgtaaccgatcagtccgaaaagtaatatgatgatggtaagcacggtggcaagcacaggcctacggatactaagttcggaaatattcataaaagtatttttttagttgttagttaatggcctgaagttccacaggcattcccttacgtaattgcagtgtacccgatgtcaggatggtatcacccacagacaatcctcgtacaatctgtacttcggcttcggtacgaagacctatgataacatctacagggtctgcaactccgctacgataaacaaatactttatttttacccatttcggggacaatcgcttcggatggaatcgctatcgcatcttctatttctttttgttttaattgaatatctgcatatctgcctgccagcagttcgccgttgcggttggggtagatggcacggatgttcaatgaatgggtttccatatctatactggattcggttgcataaacctgtgcatgataggtatccagttttccttctactttgaattccagattagtccctttttttatttcccgggcataacgttccggtacagcgaactctactttcaatggagtcactttggtcagtctggctactacagtggtgggggaggcgtatgctcccgtactgacctgcctcaatccgatgataccgtcgaatggtgcgcggagttcggtcatgtcaatgttggctttgatattttcgatatcagcgttaagggtggcaagttcggtttttacctgttcgtatgcttctttactgaccgcatctcgttttaacagggcgttttggcggaacacacggtcttcggctaaaggtatttgtgcttccagacgttttaactgagcctgtaactgccggtcgtttactttggcaagtaattctcctcgttttaccaatgtgccttctgtgaaaaaaatatcggtgatctttccggaggtttcaaaagacagactcacttcttcgtcaggaaccaggcgtccggtcaccaatatttcatctgtcagcaagtgtggttttatgacttgtgcattgactttcaatgtgcgttgcttgttttctttaggcaacgcgtcggcggctgtcagttcttcattttcgtgaggggtaaattgatagatgcctagtccggccaagccggctccgattaatataatgatgccccatttgattcgtttgttcatgtgcctttctatatgggtttaataaatacgttaatgtaagattagataaaaaaacgtggcgttcagtttaaacgccacgttcttttttaatattttttttcgtttgccagtttccacatcgcaaggaaagaggctttggttatatcgactatcttcagccaattgattttctgtgtttcatctcccggaaggtgataatcgggatgggcatcagtgtgataccatataataggtattcccagtttggcgaacgtgccgttgtcgctgcctcccaccggattgtcccaagcccggtagtcaggggataactgcaagcggtaatcctcaatatcttttttcagccagtcaccgaaggcctgatgggctgcggtatagaagtaaacgaaataatcgggctggtcctcccggttgttacgtcctatcatgtcatagttcaaatagccttttacctttttaatatccggatagttcatggcgaaataacgggagcccagcaatcccttttcctcaccatcccaaaaggcgaagataacggtacgttccggctgctcgccggtagcaagaaaagcacgggctacctgtaatacggcttgaacgcctgatgcattatcatctgcaccgttataaatctgatctccttccagcatcggatcgtagcctatgtggtcgtaatgtgcaccgataatgacaatttcatttggattctttccttctattttacctaagatattacgtaatgccaatttttgatataccacttttttcagttccgcaatagaatcgggatgtacttgccagcgtttccctttcacttgccgttcagcatgatacacgtcaaagggctgtatatagtctccgtccagtggctttattcccatctgtttcaggcaggaaatgatataattgcctgcaatgcgtccacctttccatccggcttcgcgtccttccagttcgtcacaggccaaaaagccgatatgtgcttcggctgtggcacggttaatggtttctactccttttttttcaggagctacttttttaggagaagcggcattcagcccggtggtgcataatgcaaacagtgcaatagctaagaggtgttttttcataaagttgtggtttttagtaagcggcgcgatacttgccttcttccttgtcttccaacatattcaggtaagaagtatagcgtgactcgctgattagatgtttctccactgcatcgcgtacggcgcatccgggctcgtgcctgtgggtgcagtttccatacttgcaatgagcggaatattcaaatatttctttaaagtaatgtcctacttcctcttcttccatatcgaatgttccgaaacctttgatacccggagtgtcgatgatgtatccgccgccgtctaccgggaacatttcggaaaaggttgtggtatgcattcccttgttatggtaatcggatatttcacctgttttcaaagtttgttcaggtaaaatggcgttgattaatgttgatttccctactcctgagttgccggaaagcaaagtgaccttcccttccaggtcttttttcacttcatctgtacctatgttgttcagtgcggaaactttgaagcaagggtaaccgatgtatgtgtacaggtttatcagagcatccatatagcgtgtatcatcctcattatacctgtctgtcttattgaatatcagtttgacgggtacacggtatgcttccgcggtggctagaaaacggtcaatgaatatagttgaggtttcgggataattaattgtaacaatcagcatacattgatccagattggcagccagtatgtgcgattgtttggaaaggttggaggcgcgccggatgatatagttcttgcggtcttctatctcactgatgaaggcggttccttcattgttgataatgatttgtacataatctcctacagcaatgggattggtactccgaataccctttaaacggaaatttcctttgatcttgcattcgatggtacgtccgtcttctgttttgacaagataccagctgcctgtgttttttattactagtcctttcataaattaaaatgaagaatgaaaaatgaagaaagaggaattggatcgcacggacaaaagcaaggctgtgcaggacaattcttccttcttcattattattgcttcattattttaagttcttcattaaaccgtcataatttctttatctttctctgctagaagttcttcaatcttcgcgatatatttatcgtgtactttctgaagtttggcttccgcattcttttgctcgtcttcgggcataccctctttaacggcctttttcagtgtgtctatagcgtcacggcgtgcgttgcgtatacttacttttgcggtttcgccttcgcctttacattgtttggccagttgcttgcggcgttcctctgtcaatggcggaatacccaaacggataatttcaccgttgttttcgggagtgatgcccagatcagagtccatgatagctttttcgatgatacggaacatacttttgtcccatggcttgatggcgatactgcgtgcatcgggagtagtcacggcagctacattactgatgggaaccatgcttccataagagtcaacacgaatgccgtccagcaaccgggtactggcttttcctgcacgaatgtgcgctaaggcttcttccaaatacataacggccatgtccattttctcttgtgcgtcgttgatgcaagtttttgcgtctatcatactgttctgttatttaagttgtttattgattcgttttaagtgaaacaaaagtaatttattttttgattatctgcaataaaagagagatgattttatatttctaacggctctttaccttatcatcaccagtttaagttgttggggctttattaaaaacaaatgaaaagtttttgtgttttatcggataacagctatctttgtttctatcccataagcagaattagaaaacaatgagaatatggaagaaaattacagacgataccccataggtatacagaattttgagcagttgcgtaaccggaattgtgtatatgtagacaagaccgaactggtttaccgattggctaacacggacagtgtgtattttctgagccgtccgcggaggtttgggaaaagcttgttggtgtccactcttgaggcttactttcaagggaaaaaagatttgtttaaggggctggccatggagcgtctggaaaaggactggaacgtgtatccggtattccatattgatttcagtctgactaaatatactaccctgttcgatttgcaggaacagttgaatctgtttttacttcgttgtgaaaaggtttatggggcggaaaaggaggaaaagactcctgctgctcgtctgcaaggtatgatccgtcgtgcgtatgaacagaccggtctgccggtcgttgtcctgattgacgaatacgacgctcctcttttggacagtaattccaacatccccttgcagcaggagcttcggaatgaactgcgtaagtttttcagtcctctcaagggattggggcaataccttcgtttcctctttatcacgggaatcagcaagttcagccagatgagcatcttcagtgagctgaataatttgaagaacatcagtatgcgggatgacttcagcgcgatatgcggcatcaccgagcgggagttgctggacgagcttcgtccggacattgagcggatggctttggcgaacggcgagacgtatgaagctgcctgtgcgcatctgaagcggcagtatgacgggtatcatttcagcaagcattgtgaggatatttacaatcctttcagtctgttcaatgcctttgatgcaaaggagtacaagaatttctggttctctaccggcactcctactttcttgattgatttgttgcaggaaacggattttgacgtgcgccagctggagggggtggaggctacagacgagcagtttgatgccccgacggaacgtgtaactagtcctatccccgttttatatcaaagtggttacctgacgatcaagggatatgatcccgagttccaggtgtaccggctggcctatcccaacggggaggtgcgtaaaggtttcatcgagtccctgttgcccgcttaccttgagttgccgggtcagagcagtactttttatgtcgtttccttcattcgcgatcttcgtaagggagatatagagagctgcttggaacgtacgcgttctttctttgcttccattcccaatgatttggagaacaagacggagaagcattaccagaccatcttttatttgttgttccgtctgatggggatgtatgtggacagcgaggtgaaaagtgcggtggggcgtgcggatgtggtcataaagatgcaggatgctatttatgtgctggaatttaaatatgacggtacggcccgggaggcattggcgcagataaacagcaggctgtatgctgttccttatcgcaaggatggcaggcgcatcgtgaaggtggggattaatttcgacagtgccacccgtactatcggggactgggtgatagaagtggaagatacggtggataatttgtagcttgcaggcggagtgacatttcgaaggtggctgtctgcttttgatgaatacttaagcctttttcccctgtatactaagtcttttctactgcatgattaagctttttcatacggtaacctactacagactccgataatggactgtataaactattgtagtggaccgtacggtctgatgtaacagactgtacagtctactgacggagtctgtagtaggttaccgcatgaaaggccttaactgtacggaagaaaccccttaatctacggggagaatacttttataggcaagattgttatttttttatcatctgtctgaagattgcttttctttggaaaggagaataagaaggttgcccttttgaagtaaatctggccggtaagcattatctttgcattaaaaaagatgataactttatatttagcccgtcacgggcagacagaagagaatatcgcccgtattttccaaggacatatgccgggcacgctgactgttgaaggaatagcacaggctgaagcgttgcgtgatactttgcggaacatctctttggatgcagtggtcagtagtgatttgaaacggtgtgtggatacggcccgtatcgcggtggaaggtcggaacctgccttgggagaaaacagtcttgctgcgtgaaatcgattgggggagttggacaggtcttgccattaaagaagttgatttgcaacattttccggcagatgtggaaacggaggcgatgctctatgaacgtgcggggcgttttgtggactacttgaaagagcgatatgatggaaaacaggtgttggccgtcgggcatggactgataaacagggcggtacaggcacacattcaaggagtgactttggaacatttgcgtagtgtgccaaagatgaataatgcggaactacgccggttcaagttaacgtaattccgcattgaataacacgtggttattgcaaagtgattcccattattcctatcaccacatcattggacagggtttccagggtcagcccttttagttccttggaatcatccaaaggaatatcgagcaatatgcctgcaccaccctctatctcacgtccatatacaccggtgatgttgagttccttacccaggtcacggcttactttaccgcttttcaagtgcagacggtacggccggggagcaggtacttggaatgcttttccgtccacatagaagtcttgttctataggacaccagttgtccggattggtcaactccgttgcttgggaagttccgtctgcatagtgtatgcggattattccattggcaatgtggcactgcatgtggttggtacttcccgccatcagcagataagcatgtgaggccgtgccggatagtgagatggtggaactgtccgggtaattatcccatagggaggtgaaaagaatgttgtttcctttttctttcagacggaaggggatgcctaaagacgtttggaaagtatcatgatgtacaagactgcgtaattccgagtcgtctatggtagcggtcagcagcggatgacaccattctcctattccctgtgtgggaagttgcaacgtagtgtatggagaccggggagacaggtattcattttgataaatatcggtgacggaagcattcagttgtctgtcaaaatcaaccatccggcatttttcgggacggatatctgcaaagtctgtataggagggggctttccgggtgttctctatatagatattaacaggttgccaccaatccatttctccctgatgagtgtaaacaaagaaagtgtggtgtcccggttcaccttttatctgtgcgttgaaagcggtggcttctacagtgtgatttgctaaaacgctctgaggatcatatacttgggagatggatgctcccgaaggtatttgcaaagccaacttcccgtttgaagtgatgactggttcctggactgccaacgtgtgaagtggtgctccttcccattcgatggtaatggtggttgaagatgttccttccgcctggattgaaagaagaggatagccatgggccgattcgatggattgccatgtggcagggacaccgttcacttttactgaacggatcttctcttttctggcattgacgtgcaataccggatggagaggagtctggaaccgttgtgtgatatgataggtatccgtatcttctttccgggtaaagcgatagcttatatcgggagtgctgacggaagccttgtcccagtcgtccgggaagcccggccggaggatgatttgctggttcagggcatccggcaggataccgaacagaccttggatcagtactcgtgaagcgactccgatgggatcaccgaaatcgcggtagcattctccgcgtgcggcatcatagaagctgatctggccgaagttacccggactgtctcctagatacatgccgtccagaacagagcttttcaaaagtttgtatccggcgtcggcacgtccggcctggaagtatgacaatgcggtatgcatcacttcggcaaaggcgacattattgatgctccatgagtagggcagccagttggtggtggcgatagtggcatagccattctcttttaatccatgggctgtgacgggaatatgaggaatggctgtgtctacataacgggtagcctgataggcttggaacggattggctgtttcgctgtctatagcatgataaatggtccatacagcggcactttcgtgtactcgcttgtgacccataaaatcttgatattccgcccaatgtcctttgtcgggaagccatagcctctcgttcatggctttcagaatcttttcggcttcgttgcggtaaggagtgggatcttcgcctatcttttcagccaattgggccactgtcttgttggcacggtagttataagccgatgaatgggtgactgctccgctattgtaataaagggcgtcactggcccaaatacaggcgtatgcgtcatacagcccgtcgttatccgggtcgtagttcagcttttcccatgcgaggtgacgggtgatgacaggccacatttggcggacataatccaagtcccccgtccacttgaaatgccataacaattcgtctatgtagcaaaggttcatgtcgtagtggtgcatctgattattgcggtgcggattacggcagatgtatccgttactgtattggggtgtaccccatttcttgacggaacgtgccagatgcagggcggaatcttgtgccggatgggggagggtgttgggcacttcggtgacctgacttgccgcgtatgcgttgaaatgggtccgggcacggtcatgccatcccaaaacatcgccggtataggcggctcgccagccactgaggggcattcgccagcctatggcaccgtgtagccacacttcgccgtcccagattccatcggcagccatagccagcgtgcctcctaaggtgttgaaataagggtcgggtgtttcaatgcggatgcgtgaggctgtttcggagcgggcggcttctgcctttttaaacaggttttcgccttcggcagtcgtcagtgtgcgtagttcctggttttccaatagcatataaagtgttccgtctatctgtaccgggaaggattgtaactgttgaggctggagaggagcttcgaaactgtcggctgggtcggctcccatgtctccgttacggtttagtttggaattacgtatctctgaaatggatgccagtagaacgggatggaattccttgaaattccgggcgttgaattgccagatggccccttctttatcgggaagtgcccatgtggtaatggataagcttccgcctccgaaagccggatcagataaactgtagctgcggcgtcccgctgtataacgggactcgcagtgttcggtagagtcaagggctaccgtgcctccggaggtttgcagtttaaagcagatgtgcttcggattctccttggtataagcagcgaatacgggccggtcgcttgtttccagccggaatgctgtgtggctgccgtataaggcacgggtaaagcgattcttaccgttgatgcagacaaaatcgtctccgtcaggggtatattgcaggcttcgggtggcattccggcgatgttcgttgtacgaagtggattctatgaaatcacctatcttttgtggctgtttggtttgtcctgcgccggaaacgctaccgatgcccaacaggcatagaagtaaatatgtcgttttcatgataataactgctaactcctgttcttacggtaacggctgtaacccttcccagcgtacattccatttgccatctttcggaaatccgggattgtttccttccgatccgtcccatccggcgcacatcatggcgactgtggtcagtaatccaccgttgccgggcaggtaaatacgcagacgcccgtcctggtaattgtgaccgtttaccagataggtgttggtacgtttgtccatcaataatgcgctgactgccttctcgggctcacccattcgggcggcattcatggctgtcatcggataatcccagccccaggtcttgtcccagttccagttatcccaaatccagtgcagggtgtttttcatatatccggcatgaatcagctgattcatgggcaggatgccgacagcgcccagcactgccatgtggtctgaggtaaaacggatatctttataggtatccaccgcggtctcggctgccagatacagctgttcgtcgttgtatgccagcggagataatttctctatcagcacatcccattcgggtacacgttccatccctgtacgttcacgccatgtttgggcaacttgcatggcgaaatgccagtacgaaagttcaaaaggcggattgacagtttcggcggcgcgcaacgtttcctgtgcgggaatagtgcctttcaagacataacggtcgtgctcttcctcgtatgtggcaaatgaatacatgaattcggcggtttcctgtatcaggctattgtattttttcagtagttcttccgatggattagcccgatagagcaattctgccaggtagatgagatgaggctgttgccagatcaggaagctgcctactttagagggggcttccgtaccgctgggatcagtcattttcatccatcgtatgcctttgaaaccttgtctttccgctatctggcgggctatgggttccacggtttcataccaggataaagtgcggtccagtaattcgagatgtccccataaggcgaattgtgcctgatgccaccagatcatttccaaatggaatttcccgaaccaggagttgtaagtcagtccggtttcctgtggcggggttgatccggcacattggatggcgagcagatattggcttaatacgacccggcgttccaattctttggcacggacatccgtacattgtgagaagtcggcaacagctccctgtgtccagtaattttgccagtgtccggaagaggcttgttgtacttccgcaaaagtcaggatgggagcagcggacgcttgcggtgtgaattggcaggtgaatgtaaatacactgtccgttggcgtgagtacgaaatagtttgcacttttttccctcagcttcgcagcgccttcccaactgattgttacataataggtggttgcgtcgagtgttctttttaacacagccgattgtgcatcttcactgaccagggtcgtgctatgcttatcattcgcctcccaattacaagcatcgtcacagtgaccgcccgtgggataggggaagtgaaacttgatgccggcaggttgtcgggccgacaggcgtgcggcaatcatgtcacgctccggatggcagactgtctgaatgtggtagggagtttctttgagggtgaaccggctgttgatgataccgttccacatatccagtgattgctgtatgttttgcacatccgagggacgtacttcattttctaattcgagtccgatgatacccagatgcaggcggtgtgggtttacacgataccagtcggatgcttcctttgctctgccgggttctttgggttgggtggcatatagctctttgtgcccgtggccgaagtcatactccaccaaggcttcctccggtttatagttttcgggatttccgaagctgtgccatccccattggctttgtgtacccagtggaactccgtttttatagacttcgggaaaagtctgcaatcctgtagcatctaccgtgtaggcaaattctccgtttcctaccgacagggaggataatgaatccatggcagttacttccggattattgcgtgttaccagtgcatggcggtctatggcttcctcttggggagaggtgcaagcggccaatgcaaacattgtcagagcataaatggtgtgtttcattgtatatagctaatttaaaaagatggataattctgttgtttatgcgatatgattctatttgccaagttgcaggcaacccatgatgaaaggaccggtagctttggcatcgttgtcgcgcattttttcgccaatgtaatattcaaagcttccgtcgcggtaaggagtgccgcccagtccgcctacttgacagcaacgggtcagcgtcagagttccgtcggggttttcgcgaagcaatgttttctttaatccgttgaaggctttttccgcgatggtccggtatcgggcgtctatatatcctttgttcaccgctttggcataagcatacatacattgggtggttacggatgcttcgggaaaattaccttcacgttcgggctggtctattacctgataccatagcccgtctctttgatagttgggcaggctttctgccaaaccttgaatccaactgataagcgaggcacgtccggggtggttgtcgggaatatagtccagtacatctaccatggccatgaaccaccagcctatactgcgtccccagaagttaggtgaagtaccgtcttgcggatttgcccaacgttgggatttgctctcgtcccaggcatgatgatataatccggtttccggtgaataggtatgtttgtggcaaagtgtgaattgttttaccgcttcatcaatcagatcaggatggttgaattccgctccatagcgggctaggaaaggagaagccatataaagtccgtccagccacatctgatgttgatagatcaatttatgccagaagccaccttccagcgtacgtggttgtcttttgagttgttctaccagtaagtccatggctgctttgtatttttctttgcctgtttctttatagaggtcgaacagtacttttcctgaattgatgtaatccaagttgtaagttgacatatcatagaggtggatttctcctttttcgttaatcaaactatccgcccattcctcaacatacgtaaagtaacgtttgtcaccggtatttttccacatatccagcatggcgcaacagcctactccttgtgaatacccgaaaaagagccgtttgccatgatccagctgataagctttgggaaagcggagcatctcagagtcggcaaagcgccgggcatacgagtcggaagatatgccgggaagggttgtggggactgtagggagaggggctacacatacttctccactgtacggaattgcttttttggcttggagagacatgggagccatgcaggcagtcaataaacagatgtaacagtaatttttcatggtatttcctgtcgtttttatagtctttgaatgatttacattttttgctgatgtaaaaataggctaattaacgctataagtccatgaataattgttcatttagatggaaaatctatcggttgagtctcttttttaaggaatatgtgtcaataaagaacgaatttgtggaaaaaatggtaagacagagaaaaactgttcacccatctgtcatttagaaggaaataaggaatgacaaatggatgaacttgatgagaaaatcagttatgtaccagtgttcctatattttcaccggtcattacttttttcaggttacctactgtgtccatgtcgaaaacgataatgggcaggttgttttccttgcacatgcaggttgctgtaagatccattactttcaaaccgcgcttcaatacctcatcgtaggtgatatcgtcaaatttcgtagcagtggggtccttttcgggatcagctgtataaatgccgtccacgcgtgttcctttcagcatcacatcggcttctatctcgataccacgcagtgaagacccggtatcggtagtaaaaaacggattgcctgttccggcagacataatcacaacttctccgttttccatcgcttcaatcgctttccatttgttgtaaaactcaccgatgggttccatgcggatagctgtcaatacacgtgccttgactccggccgctcccaatgcggaactcaatcccaagctgttgataacggttgccaacatccccatttggtcaccttttacacggtcaaaacctttggaagctccgctcagcccccggaagatgtttccaccaccgattacaatacctatttgtacgccaaggtcgtgtatttccttgatttgttgcgcatattcacccagacgtttttcgtctataccatattgcttttcgcccatcaggctttcgccgctcagcttcagtagaattcttttaaatcttgccatattggtttgtcttttagttttttgcaaagataaaaatattaatcttttttacttgttttatatcctaaaatatttcttcccatgactccttgcattactccgcgaagtagaagataggtaatgaatgccatccataaagcgtgattgcccattgccccccggaaaccatagtaaataagaaagaaactgacagaggctactatcatggctttcagcatcagatgggtggctgtcgcaccgatgaatattccatcgaacaaaaaagcagagaagcctgccaaaggaatggcaagtacccaataaaaataactttcggaagcatgaatgacagttgtttcgtcagtcagtaatccgagaaaggattgtccccctatactatataataaggtgaaagcaagcgataatcctactccccagccgaatagttggcgaaccgtcgtgtggagtgctttctgattattggctccgatatatcttcctgccaatgcttctccggcgtatgcgaagccgtccataatgtaggagaataaagtgaataattgcataagtaatgtattgaccgccaacaccacttctccttgtgccgcaccagccgaggtgaaaaagacagtaaccgccaccaggcagatggtacggaaaaagatatccctgtttacttggaagaaacggtacatggcctgtttgtcaaagaaggaatgccattctatgcgtttccgcagggtgctgtagtagcgtaaccacaacaaatatgccatgactagcccggcatattgtgcagttaacgttccgatggcgacaccttctattttcattcctaatccatatacaagaagaagactgaccgcaatgttcactatattttgtgtgatggctatatacatggggaaacgggaattttgcataccgatataccagccggcaaaactgtaaagccctaatacagccggtgctccccaaatacagatatagaaatagagggacgccagatgttctacttcttcagtcgtttggataaaggtgaaggcggttctttctataggatattgcaaggctagcaaagtaaatgcaatgaataatcctactccgacggaacggagtagtaaccgggtgacttcattcaggtcgtgcctgccgtatgcttgtgaagtcatgccgctggttcccatacgcagaaaaccgaaaatccagtagatgatgttgaaaagcattccgcctacagctatcgctccgatgtaggcggcagagcccaaatgacctacaatagtaacatcaatcaagcccaacagaggaactgtaatgtttgaaacgatagaagggatggctatttgaagtatttttttgtttccgttattaagttgaatcatgagtgtagattgatagagatggatacaaaggtactctctttctcataaataaccaatgaaaatttaaatttgaattgaaaatagttgttgtttaagatgatatatcattggaatatagatatatttgcggttattaaaatgatcaaaacaggagaattatgaaagagaattttcaaatccatatttggttgggcttattgttatgtctgttaggcatgtcatgttcggatgatactccggctaaaggagatgacccgggaaatggtaacacggagttggaagtcaatgagtggatagagagtgtcatgcgcagtgattatttgtggaataacgacattcctgctcaaaataagttggatttctctgctgatccccaaacattctttagatctatgctcagtttgaaagatggaaagacgagaaacggaaagcatctttattattattcttatatggagaagaataaagattataaagcacgtaccagcattgatgcggatgatacttatggtatggagtttactttatttaatgttgtaaacgatagtaatcaacctttaggatattattatgcccgtattctgtatgttcttcctaatagtccggcatcaagtgcaggtttggaaagaggggattggatcgtgggtgttaaaggaaaaaataatattaattccgataattatggaatcttattaaatggagataggactcaatggctcgtcaaacgtggcgatacagaggtcagaactattgatatagaagcttcccgggccgtggaggacaatcccttgttctatcacaatgtatatactcggggagataagaagattgggtatttggtttataatcattttacttccggaccgaatggatattcggatcgtacctatgatgaggaaatgaagaagatattcgccggatttcaggcgcaaggtgtgaatgaatttgtgctggacttgcgctataatggaggtggatatgagaattctgctaatatgctcgcaggactcctcattccagaagcttctcgaaaaaaggtgtttgctgttttctctgacaataagggacaatcctattccaatgatttttgtgtggaaacgaaaggaacggcaggttacttgaaacttaattccaatcgaatttatatattgacaagccaaagtacggcttcttcttcggaagtcgttattaacagcctcaacccatttatggatgttacccttattggcgaattgacagaagggaaaaatgtaggaatggagatgcaaaagaatgataaatatgaatggatatattggcctatcacattgagagtgactaatgcggtgaatgatgactacagtgctggttttaaaccggatatagaatggaatgagtatgatttgactcagaatccgacagacgctttattaccattgggtgatccggatgaattcatgctgggtaaggccatctccttgatcacaggaataaaccggtcagccagaagcatgaatacgttatcccaaccgattatgaggggggaatctgtgtatcaatcgacagaacgtcatgccactggaggaatgttgatggttcctgaagagaagaacaactaaaggaggtatttaacttctttgaaagcatattttctaagagaaccgtttttatctttcagaatcaaatgtccgtcgggctccacacggatcagtttggcagtaaactctccttttgcatcgcaataggggtgataaccttccttgcggtattgtgctttcaggtagtattcctgaattttggtaatgatatcggtttctctgttttctatccgggaatagagatctatgatatgttccaatacgctgttcagaacttccattctgtctgtttcctttttagtaatttgtcttaatgaaacagggttgggagcagatgaatgaaattcttcctggttaatattgatccctatcccaataatgctctgtgaaatttggcttcctgttaaatcattttcaatcaatatgccggctatttttttgtctttccaatagatatcattgggccattttatttgcaggcaatctgcatggacataatgggccaatgcggtacaaatggcagaagctaccgccatagataaaatgaactgactggcgggagcgattgtttgggggtaaaatacagtgctgaatgtcagattcttgccatattctgattcccatgaatttccacgctgcccttttccggcggtttgatattctgccataagcgtggtgaattccttgatttctttttcctggcaaagttctgcaagtcggtcatttgttgaggttacggtttcttcttttaagattttgcttgaccagttaggggatctcatcatattcttttttaagtttacgggtgaattttttgataacctcttcgtatgagtggtctatcagtgataaaataagtttgtcgtcaatgtcaccttgtaaggatacttggttccaatatttcttattgaagtgataggctccttcaatgccggaatgatgttctcttaattccaaggcatattcgggtgcacattttaaagatagccattccgggttgtccaatccgatacaggcatacattttccccatgactttgaatactaaggtgacattgtcaaaagggaattcttctgttgttcctttctttctgatacagtaatcgcgtattgtttctatgtccatatataatatatatatttttaccaaatcggaggataaaaggcttcttcaatatgctctatagtgaaaggagtcttttcgcccactaaggtgatgatatcaaaacgtacaggtaaatctactgagaacttgcgcaagtatgcatcagttgaagctataattctgcgaatcttcttatctgttactgcatcttccggattaccgaatctagtattcttgcgggtctttacctctataacaattagttcgttccgatattcggcgacaatatccagttctttttttccgcaatgccagttccggtggcggatagaatatcctttatctatgagatatgcagcggcctcttcttctccctctttgccaaattcgttgtgttctgccattctgtttctttttgtacaaaaatactcttttttatgctttgtatttacagaagtaaagctaattttgcagagaatatggcaaacaacgtaaaaaagagagtaaaagtaccggcatcaacccctaaacgcaagcagcgtatggtatgtttgatgagtgaagaggaagtacggattgtggattgttatcttaaaaagtataagataaccaataaggcgcgttggttacgcgaaacagtattgacttttatccatcagaagatggaagaggattatcctacattgtttaatgaacatgatatgagaagataagatggcagatgatacctattatatgaaacaagccttgatggaggctgtaaaagcggctgaacaaggagaagttccggtgggggcggtggtagtctgtcgtgaccgcatcattggtcgtgggcataatttgacagaaacattgaatgatgttacagctcatgccgaaatgcaggctgtcacagctgcggctaataccttgggcgggaaatacctgaatgaatgtactttgtatgtcactgtggaaccgtgtgtgatgtgtgccggtgccatagcctgggcacagacaggaaaacttgtctttggtgctgaagatcccaaaaggggatatcaaaaatatgcccccgatgccttgcatccaaagacgatcgtggtgaaaggaatactcgccgatgaatgtgcccgattgatgaaagatttctttaagaaaaaacgataattcttatttcacctcttcataatctacatactctccctcatcgtcatcaaagattttttttctgtttcccgatgaatgagaatgtctatttgaagaagatgaagagaattctgcaaagttttcattctcgtcattcgtttgagtctgggcatatgtattttgtttttggtgggtagatgttcgattctggtaggggggatgcttgccgatcccgaacaatacacgcagaatgttgcctaatatagtgaagccgataaaaacaatcagcagaaaaataataagtagaaagcctaaaaatccaaacatagtaatttcttttttttatataccacgtacaacaagcgtgccacgtttattgtttacgctctttttttagttaaaagagatagaatgatataccacaggatgatagctgcaaaactgctgattttgaagaaagccaacaggggaatacatacaatgaggaaaatatagctgactttgttctgtttccaggcaagactcttgaattttaatgagaacattggaatttctgccaccagcaataatgacataataactaccaagatgaaaagatatgccgcattaaaagaatcggatataagaaaagaatgtgctcctacagtcaatgacccccaaaataaagcattagccggagtgggcataccgatgaaactactgctctggcgtgggtcaatattgaacttgcctaaacgcaaagctgaaaatacggaaataaggaatgctgtataaggcatataatcggcaacaggcaatagaaaatcaggatagtgtacctctttaaataaagaaaagacaatggcggaaggagcgaacccaaaagtgatgtcatcggccaacgagtctaattcttttcctaaaggccctgaaactttgaacaaacgtgccaacatgccatcaaagaaatcaaatacagcgcctagtataatgaaagagatggccaaggtatagttttcgttaaaagccatgacactggcaatacagccggagaataaattacagcaagttaccgcgttaggaatgtggcgtgtgatacagtttgccattggtgattttcttattttagtttagcaatgacggtttcgttacctacagtcgcttgtcccatcttgacacagacttcggttcctagtgggagataaacatctacacgcgaaccgaatttaataaaccccatgtgttcatcaatgtagcaatcttctcctacttcggcataggtcacgattcgacgggctattgctcctgctatctggcgcgccatgacagtatgtccttcaggagtttcaataacgaccatagaacgttcattttccgtactggctttaggcagccatgctttcataaatttaccgttatgatggtctacatgtttcactactccgtctacgggataccaattggcatgtacattgacaatgctcataaaaatagaaatcattaaccggcggtcatgaaaatattcatgttcatctacttcttctataactactattcttccgtctgccggggctactacgattttttcagtgtcgtgctcgaataatcgaatgggacaacggaaaaagttaaccattaacaggtaaacaacgatacttgcggtggcaaatatataaaatggaattttgcactcaattccccaaaacaatagggcattgataccaattaacaggatggcactgacaatcaagatgcttgttccctctctatgtagtcttattttctttaatttcttcagtcggttcatgattgtataaaaccaattatcgtgcaaaaataaacttattttgaaaaccttgcaaataaaagttgttagaaatgcctatttcgacttcatttaagataaaaaaagcgaatgttgataacttcttctttatctttttgcaggttttatgaaagcagagtatctttagacaattttttagtagagtaacgattatgcaggattttgtccatttacatgtccatacccagtattccatccttgatggccaggcgtctattccacgtttggtagacaaggctatggctgatggaatgaaaggtatagccgtaacagaccatggtgatatgttcggtatcaaggaattcttcaactatgtaaataagaagaatagcagtactaacagtgagataaaggatttgaagaaaagaatagccggactggaaaaaggtacggtggaatgtgataatcccgagacggaacttgtggcatgcaaggaaaaattggaaacggcaaagaagaaactgtttaaaccgattttcggttgtgagatgtatgtggcgcgccgtcgtttattcaacaaagaaggaaaacccgatcaaagtggttatcacttggttgtgcttgctaaaaatgaaaaaggataccacaacctcataaaattagtatcaaaggcatggacggaagggttctatatgcgtccgcgtactgaccgtgtggaattggaaaaataccatgaagggttgattgtctgtactgcgtgtattgccggagaggttcctagaaatatcatagctggaaaatatgaagaggctgaggaagctatccaatggtataaacgtgtattcggagatgatttctatttggaattgcaacgtcataaagcgacggttcctcgtgcgaaccatgaagcttataaattgcagcaaattgctaacgaaaagctgatagagtattctaaaaaattcaatgtcaagctggtttgtaccaatgacgttcactttgtagatgaagagaatgctgaagcacacgacaggctgatctgtctgagtacgggtaaggatttggatgatcctaaccgtatgctctattcaaagcaagagtggatgaagacacgtgccgagatgaatgaagttttcgctgatgttcccgaggctctttcaaatacggtggatatttgtgatcaggtggaattttatagtatagatcatgcaccgattatgcctacttttgctattcctgaagattttggaacagaagagggatatcggaagaaatatacagaaaaggacttgtttgatgagttcactcaagatgaaaacggtaacgtggtaatgagtgaggaggccgctaaagccaaaatagagaaactgggtggctatgacaaactctatcgtattaaactggaagctgattatctgaagaaattagcgttggaaggtgcgcataagcgttatggagaagtattgagtgaggaagtgcaggaacggatcaaattcgaacttcatattatgaagacgatgggttttcccggttacttcttgattgtgcaggattttattcgtgccgcgcgtgaagaattggatgtgtctgtgggaccgggacgtggatcggcggcaggttctgccgtagcatattgtttgggtatcactaaaatagaccctattgcatacgatttgctgttcgaacgtttcctgaatcccgaccgtatttctttgcctgatattgatgtggattttgatgatgatggtcgtggacgagtattgaattgggtaactgaaaaatatggtcaggaaaaggtggcgcatatcattacatacggtacgatggcaaccaagctggcaatcaaggatgtagcccgtgtacagaaattacctttatcggagtccgaccgtttgtgtaagttggttccggataagattcctgataaaaaaatgaatttgcctaatgccatagcttatgttcccgaactacaggcagcggaagtctcacccgatcctattttgcgtgatacgataaagtatgcaaagatgttggaggggaatgtccgtaatacaggtgtgcatgcgtgcggtactattatatgtcgagatgatataacggactgggtgcctgtaagtacggcagatgataaggaaaccggtgaaaaaatgctggtgacccagtatgaaggttcagttattgaagatactggattgatcaagatggactttttgggtctgaagaccctttctattatcaaagaggcgattgaaaatatcaagcatagtaaggggattatcttggatattgacgaggttgacatttcggatcctcctacttatgctctttatagtgaaggacggacgattggtacattccagttcgaatctgccggtatgcagaaatatttgcgggaattggaacctagcacttttgaggatttgattgcgatgaatgctctttatcgtccgggacctatggattacattccggactttatcgaccgtaagcatggccgtaagcctattgagtatgatattcctattatggagaaatatttgaaagatacatatggtattacggtatatcaggagcaggtcatgcttttgtcacgtttgctggcggattttactcgtggcgaatccgatgccttgcgtaaagcaatgggtaaaaaactgagggacaaactagaccatatgaagcctaagtttattgaaggcggacggaagaacggtcatgatcccaaagtacttgagaagatttggacggactgggaaaagttcgcttcttatgcattcaataaatctcatgctacttgttattcgtgggtggcttatcagacagcttttctgaaagcaaactatccggcggaatatatggcggctacgatgagccggaatatttcgaatatcacggaaattactaaattgatggacgagagtaaggcgactggtatcatgaccaagggacctgatgtgaatgaaagttatctgaagttttctgtgaatcgtaaaggggatatccgttttggactgggagccattaagggagtgggggaaagtgctgtgcagtctatccttgaagaacgtgagagaaatggagaatataaagatattttcgattttgtacagcgtgtaaatctttcggcttgcaatcgtaagaatatagaaaacttggctttggcaggtgcttttgatagtttcacaggaataaagcgtgaagacttctttgtaaagaacgctaaagatgaaacctttaccgaagtgttggtacgttatggaaataagtatcagatggataaagccgcagctgcaaattctttgtttggaggtgagaatcaggtggatattgctactcccgaaatcattccgtctcctgcatggggggatttggaacgtttgaataaggaacgtgatttggtaggtatctatctttctgcccatccgttggatgagtatgctgttatattagagaatgtatgcaatgtccacatggcggaacttgccgatttaacccctttgcagaacagagacttaaccatgggagggattgtgactgcagtgcgtgaggggtataccaagacgggaaaaccatacggtattgctaaagtggaagattattcgggctcagcagaatttgctttcttcggtaatgaatgggtagagaagaagaacttttttatgaccggtatgtttttatttatgcgagggaaatgtcagccaaaacaatggcggcaggaagaatgggaggtgaagataagtactattgagttgttaccggaagtaaaggaaaagattattgagaaacttacagtttcagctcctttgtctgcattggatgaagagctgataacggagttttcagccttaatcaaggcacatcccggtaatgcagagctttattttcatgtgatggatgaggatggacaaatgtatgtcaatctgatgtcacgtactatgaaaatttcagttcaaaaagagatcatgacttatttaaagagccaaccacagctctcttacaaaattaattagtatatttgcgctaacattttaaataactaagtataataattatggcactagaaattaaagatagcaattttgaagaattgctggcatcaggcaagcctgtagtagtggacttttgggcaacatggtgtggtccttgtaaaaaaatagctccggatgttgaagctttggcagaagaatataaggatcaggtaataattggaaagtgcgacgtggatgataacgacgaactgaccggtaaatttggtgtacgtaacattcctactgttctttttatcaaggacggtgaagtgaaagataagactgtaggtgcagtgaccaaagctcagctggaagaaaaaataaaagctttactgtaataaaaagaatattcacccctttaatatatacgactatgggaatggaagacgatttcttattggaagatgaggatgatcaaaaaacgatagagtttatcaaaaattatctgcctcaggatttgaaagataaattcacggaggatgatttatattatatccttgatgtgattgtggattactatacctccagcggatgtcttgatgtacaacctgatgaagagggatacattaacattgatcaagatgaaattgtgaattacatagtcaaggaagccaagaaagacggaatggggccttatgaccccgatgatgtattctttgtagtccaaggggaaatggaatatgggaattcattgggacaagtggattaagaagaaagtctcataataaaataaaagatgcgtatctctatgtgggggatgcgcatttttttatacttgaaaacaaggtagtatctactattagctctcttatttcttttgtaaaagaaaataatagaatacctttgtaaaaacactcatgctcattttaactataaaaacattgcttaatggctaaaaagaaaaattcccaattcctacctggtcttttggaggatatcatgtctttattgaccccggaagaacaagaaattgcatttgaattgtttaatgatggagcgaatcaggtagatgaagaactgtctcatatttattatcatcatcagtgtcccgattatagattgattgcgcagccgatcgcatcttatctgatgcctttgtggacgatggatgatatgagtagtctgtcaccggctgaaatctactcttcttgtgctgttattccacaagaaacattggaacgagatctccgcaattttatctttaatatctttgtcgtatatcggaaaatgcccgaaaaatgttattcatatagaatgtggtatgcattaggaataatggagcattttcgtatggaacattgtttggatattgttttggaagtgctgcggcaagatttggatttttatgatttttatttcggttatttgtatgaaacaatgttgtctgccattacctatcaattgggacagaatcaattagatgttttgatggactttatgaaagagcccggactgcttcctatgtctaaatatagagtgattgaagctgttgctcatattgtgataactcatcctgacagaagagaggaagtgatggattggtttggtaatttgttgagttactattttgatgtactgaaagagcagaagaatgatatttgttctactttgctgcttgatcatgttacagcttgcatgatggatattcgcggggtagaaactttacctattttgcaaaagatttatcggacttatcatattaaaccttatggtattccaagtattaatgaactaaagaaaaaaatgccttatgcggaaatgcatgggttggaaatggaacgggtagaggattatctagttgaagttttcgaggttgctactgacgaggaagaagatgaggagatttatgatgatccgctttatatggaggagcagcctgctaaaaaatttagaataaaaatagagttgaaagactctgaaccattagtctggcgcatattggaggttccttcgaatatttgtttggaaagattttctgaggtggtagaagtggcaatgggatgggatggttatcatttgcatcgttttattaaggggaacacttattatcttcctcccaaagatcgggcagatgattgtttttttgagggtgtacccaaacagtttgattccggtatgctttctttaggtgaattattaagtcgtaagggatcaaaaattaagtatgaatatgatttcggtgatagttggatacatgaaattatattagaatcctgccagtcctataagaaagaggaaattccggttatagccttgttggatggtgaaaatgcttgtccgccagaagattgtaatggcatatgggggtataggaaaatgctgaaagctttagaaaagcctcgctctaaagctgcgcgtgaatataaagaatggttggggtataattttgatcctactgaatttgatcttgatgaaactagggggctgttggctgaaattgtagattgatttggatttttgttataacagggggcgggtggaaatcctgctctttcctaaaaaacttgttttatgtctgtggataggggaatgtaatatccacagattttgttcactatgtgtttatacgatgccttgtatattcaaaaagaaataaatgcctgtagctatcattaatagtcctaatatagcatagaaaagtcgtgcacgctgacgccctgcattactgacaatgaactgtgtgttgtgtgcggtaaagaaccactcccaattaaataaggctgccagaacggacaatagtcctaccaatacgaatatggcttggatcagataatgcattcccataatttaatgaatttggctgtaggggcagattttgttcgtccctacagtgaatatttttcttttattcagcttcaaagtgcatgatgcggcttccatcttcagattcttcaatctcgacttttacagcattgccaggcaaaagttcttctaccagttccggccattcgatgaagcagagggcaccgctatagaaataatcctcatatcccatgtcgtatacttcgtccagtttcttgatacgatagaaatcaaaatggtaaataagttcaccggtttcatccgaacggtattcgttgacaatggcaaaagttggcgagttgatgacatctgttacccccagctcttcgcatacagctttgataaatgttgttttaccggctcccatctttccgtagaaagcaaaaacggtattatcacccatagctgcgatgaattgtttggcagcttcgtggatagagcctaaagaattgattttaatttccatatccattggtttgattgagtttcttttgtttgcaaaggtacatgcttttccccattttgcaaaaagtatagatgaggattgaaaaaaagattattgctgcacccgaaggaacttgtaatttataagaaatgaacagtccacctaaacaacctgcataaccggtgatgacagaccaccagataattttcttgaaactatgggtaaacaaattggcggtcatttgcggtaaagtcagcagggaaatggcaagtactatacctaccatgcggaggcataatacgatggtcagtgcgatgaacatcatcagaatatattcaaataaagctaccggtatacgttgggaacgggcgaattcccggtcgaaagcgatgcaaatgataggattcagaaataaagtgaagaatagtgtcagcagcacggaaagaatggcaagtaacagaatgtctgtgggcgtaatggtcagaatgttgccgaacagaaaggcggataaatcgggagtgaatcctggagctagaaagctaaagataatacctactgccataccgaaagtccaaaacacggcgatagcggaatcttcgcgcatatctttccgtttgcttaaccattctaccccaaaggaagagagtacggagaagattgcagcagataatagaggggagattcctgcgtataatcctaggccgatacctccaaaagaggcgtgggtaattcctccactgatgaataccaaacggcgcgtcacaatgtatgtgccgataatgccacaggcaatgctggcaaacaagcttcctagcaaggcatgttggaagaaagtataatgcaaaagttctaatatatccatatttttttcagtggtttttattcaaatggagactttgcttggtgtaggcggattatttgaatcttcgttcacctacaatcaggaaaagctcgtctttcaactcgtccggcagttctattccacgcaattgcaggctacggctccatccggctacttcatcttctttacaagtgtacatgatttcccgaaattcttccacttcttcttcattataaccatttgagggacggccgcgaaagcggtccagttcctcgtcatcataatattctatttttttgctgacagcggcaagcaggctttctttttcacaaatttcatgttgcccacaacattcagcgtctgcttccactatttcgggagcagccttcaattctccgctttctatctttttttgtatctggcggttgtgtaaaactcccactgtcatggcgatacctgccaaaataatcagaccaataataagtatgagcataactttatacctcctctattataaaaccagctttctttaaatcttcccaatagtaaggataggattttgaaacgacctgtggattattaatccggatttcgggcattactacacaagccggagcgaatgccatagccatacggtggtcctcataagtgtcaatggcaacatcagcggtcatttcacatcgttcaccttcccaagacagaatacgatcatctgtttcatgaagtatatatcctagctttcccatttcttgtatcaaggctgccatacggtctgtttctttaatcttcaaactttgtaagcctgagaagcggaagggaatattcattaacgcacaagtgacgacaaacgtttgtgccaaatccggttggttgatgaaatcataatccagccgttcggttattttatcggtctttttcaatgttaccgttttatttccataaatactttcgattcctagtaactggaaaatttcagccactttactgtccccttgatagcttgtttcgaataatcccggtaagatgatttccgctttgttggaaagagcggctatctgataccaatatgaagctgcgctccaatcactttccacgtagaaaggtatggattggtagggttgcggctcaacttttagttgatattcattgagccatttggctctagcaccaaaatcgttcatcagctgcagggtaaggttgatataagggcgggatatgatttctcctgtcagtgtaagggtcagtccgttacttagtataggggcaatcatcaataaggctgagatatattgagaactgacattacccggcaggctgatggtatctttctgcagtttgtgtccggtgatacgcagaggaggatatccgtcattgattatgtattcaatttctgctcccagctcacgtaaagcattgaccaacacctggataggacgttgttgcatacgttgtgtaccagtgatgatccgtgttcccggagtgacggacaaataagcagtaagaaagcgcatggctgttccggctgccataatgtctatggtatttttgccgtcatttaaggcgtgaatcattacttgggtatcatcgcagtcagataggttctcaagttggaatattctatttcccagtgcattgattatcaatgcacggttgctgatactcttggaagaggggagctggatagttgtatgtatttgagcgggtgccgttacttttatttgcatcataccttatataatataataatgtgtatcggattgcaaaggtaggaatattatcttaatacttgaaggttgctacttaaaaaaggaggccggagagtataaaaaagccgggaacatggaaaggtggttgttttgttcccggcccggacatatagtgaaagttaagctatagtgatgcttgaatccaaataaacatcttgaatggtatttagcaattcaattccgtctttcattggtttttgaaaggctttacgtccacttatgagacccatacctccggcacgtttattgacgattgctgttattactgcgtcttttagatcagaactgccatgagattcacctccagagttgattaatcctacacgtcccatgtatccattggctacttgatagcgacagaggtcgataggatgttctgaagtcagttcggtataaactttatcatttgtctttccgaatttaatggctgtaaaaccaccgttattgaccggtaatttctgttttacaatatctgccttgatagtaactcccaaatgattggcttgtccggttaaatcggctgctgtatgataatctacaccgtcttttttaaaagcattgttacgtaagtaacaccataaaatagtagccatgcctagttcgtgggcatattcaaaagcttccgctatttcaaccagttgtctgcggctctgttcagaaccgaaatagatagtggcacctactgctacagctcccatattccaggcttcttttacagtaccaaacatcacttggtcgtaagaattgggataagtcaataattcattgtgatttagtttggcaataaaaggaatcttgtgggcgtatttgcgggcaacggaacctaatactccgaaagtagaggctatggcattacagcccccctcaatagcgagttttacaatattttccggatcaaagtaaagtggattgggggcaaatgaggctcctgctgtatgttctatgccttgatctacaggaagaatagatacataccctgtatttgcaagtcgcccgtgtcctaacagggtttgaatactgctcagggtacgaatattgcggtctgatgatatccaagtatcatcaatggtgcttgaagaagggatatggattaatgatttatctatagttctacaggtgtgctctaaataaaatgctgcttggtcacccaataaatttgttattttgctcatactcttttttctttaattgattaataattttttatccatagtgttttctttctagtataaaagcgtatgattgcgtttgaatgcattattgaaaacactattttgatgtattctccattctgtgatggaggtttcggacagcgcaggaaaattatttcctgccaccggggttggtttttccttgatcggctacagcttccattagtttttttattttttccggatctcccaaaaagtagtctttcttcaaattcaggtcattatcaaactcgaatacatacggaacagcagtaggtagattaagacctacaatttcctcatccggtatatgtttcaaatatttaataattccactgaggctgtttccgtgagctactaccagcagttcgtttgctgtagctagattggggaagatgatgcatttccaataaggtaatatacgttctactgtttctttcagagattcggtacgtggaagatctttgtcaggaacttctttataacgggtatctgttttcggattgcgcggatcatcttccggtagggcattgggggctacgttaaaactacggcgccatatcaagacttgttcttctccgtatttagaagctgtttcgcttttgtttaatccttgcaatgcgccataatgtttctcatttaggcgccaacttttctctacaggtatccagtcttgatccattttatctaggacacagtttaatgttttgaccgcacgctttaaaaaagaagtgtaagctttatcaaaatgaaatcctttttcttttaagagtatacctgcttggttggcatcagcgatacctttttcggttaaatctacatctgtccatcctgtaaaacggttgtctttgttccaagtactttctccatggcggagtaatacgattcttttcatttgttctcctttctttattacccggtaatacattttctgttagtggcaaaattagttgtagcatacatacttatcaatacccattaattatgaatttaacagcggaaggcaaggttttgtttctctttttattatttttgtactttgtaattaaacacatgccatgaaaagaattaaaacaggactaacgggatttatattaggagattggttgggaatgccttacaggggaaaaggaaaagggacatttaaacctatgtggacaaaatcttatcttcggggagacaaatgttcaggaaatacttcgatgttattatgtgctttggacagtcgttgtaatttggaactttatcagcagaatttaagagattggtattttaatagaaagtatacaggagaaaacattgagtttgatattgatcaggtaacccaaaaagcaatcatgaaaaatttcaggggagtgtcttcggattctaatagcggcaaccgtagtttgatgggatgttgtgttttggctttttcgcctttatctaaagaggagatttttccttttattaagattactcataatagtcgttatagctttaagtatacttggttttttattgagtttattcgttgcctgttggaatatgaagataaaggacaggcattacagcaggctgagcagagatgtggtgtggaggttaacaggcaaaatctttgtaatggaagctttgttgtagatacggtggagtcagtggtcaattggtttatggcaggaaatagttataaggagtgcgtattttcggctataaactcaggtaagtcaagtgatgcggtaggagcattgacaggtttgctggcgggaatatattatggattagaattaaagaatggagtgaaagggtttgaaacaatggaatcttatattgattcatttatccagtaccttaatcatcccactctttaaattccaatgaaagttgttcccattgtttttttatttcttctttttcttcttttggattagatacggatagtccgataaggcggatggggtggctttcataatcaatttctttcagtaatttttttgctaaaggaagaattttatccatgcttgtcagttcactgtcttgagtgatgctgcgggttatttggttaaagtcatggaattttatttttaaagtaagtgtattaccactgaaattagtgcgtttcagtctttctagcaattcggtgactacatgatatagttcaatgatggcggaagaatgaagagaaatgtctttttccaatgtatgttcgcatcctacggacttacggattcttatgggttctacaggacggaggtctatgcctcgtgcaaaatcgtaatatagattacctgctttgccaaactgtcgggtaagcatttctaaagtgcaggcttgtaattgggtaccattatgaatacctaatgcgtgcattttttgggctgtgaccggacctactccccaaaaagattcgatgggaagatgggcgatgaaatccaatgcttggtcgggatgtattgtacataatccgtcgggtttgcggtaatccgatgctattttggctagaaatttgttataagagaccccggctgaagctatcaatcccaattctttgcggatacgcttttttatatctttggctatatctatagcaagtgaaaagcctgctttattttcagttacatccagaaaggcttcgtctagtgacagaggctctatgatatctgtataggtatgaaagatatcgtgtatctgccgggatacagctttatatacattcattcgccctggaacaaaaatcagttctgggcaaagtcttttggctttttgtgatgacatggcggaatgtactccgtaacgacgggcttcgtaactggcagcagctaccacacctcgttcttcagcgtgtcccacagcaagcggttttccacataattcggggttgtcacgctgttctaccgatgcgtagaatgcatccatatcgatatgtattattttgcgttcggacatcttcatgaaatttgtagagcaaaggtatgaaaaaggtttttggttgatgagttctttaacagctttatttgttatattttcattaatgttatttctgtataacgaatacgagagaggcacataagaactgccccttttatttatctgatgatgcgaaatttccgctggaccccgaatattggtttcggtaaggtaagatcaatgttgggtagtataataaaaagaaggagttagttttcactaaactccttcatgctcagcttgtcggggtgactggattcgaaccagcgaccacacgccccccagacgcgtactctaaccgggctgagctacaccccgttgttttgtttaacgggtgcaaaagtacgtatttacggggaatttgcaaaattttcaggcgcttttttgctcaaaaaaaacgttttttaattggctttatttataagtttctgttgctcagtggaatagttgatggctgtaatggtattagatttcctttatttgcattaagttatttctaaagttttaggaatatgttagagaaatggaagtttttggaattcgtggagttgctattttttttaactttttttttatgaatcatttataagatgtttgtactgtggtctttttatttttgcacttgatttattaatttataattagtttgatatggcaacattcaaattattgcttcattcggcaaataaaagaaagaatggaagttatcctgtctcgttgcggataacaaaaaacatgaagcataagtatatctctttaggtctttatggcaagaaagaagaatgggacgaaaaaagtgagcgtttccgttgtgacaagcgtgtctgtcctaattacaaggagtataatgcgcgattagtccaattattggcacgtgttcagaatgttgaacttgattttgagcatgataaaatagactggactttgaatcagtttgctgatgcttttttatataagagtaagcagggtaagtttcttgattttgcagttctctgcatagaggagatgaaagccacaggacatataggtaatgcacacgtgtgggagaggctcctttataatctgaagctgtttgataagaaacttcatgtgctctgttttcaggagatagatataaagtatgtgaattcctataatcaattcatggagaagagaggatggagcggtaatacccgtaaacatgatatgaaaaccttgagtgctatattgaaccgtgccatcaaaacaaaggaatattcaggtaattcttatcctttcgggaaagacggtttctgtatctctgctttggaggaagaaacccgtaaaaggtatctttcacaggagtacttggacaagctgatgaatactgtgtttgcgaataagcctagagaagtggcaaggcggcttttcctgttttcctatttttgttatggaatgagcttcattgatatggcatatttgaagcgtgataatataaaatcggaaggaggaggaaaataccttgtctataagcgtcataagacggagcatagtaaaaacgcgagattcatcagaatccctttgacaaatgaattgtgcctgctgcttcagtggtttcgagataataccttgttggtaagtgattatttgttgccttttgtttccaaggattatgtcggtgagaagctgtacaatcatcttcgcagcagattgggcaggtataatgagagactgagagaaataggagaagaattgtgttttcaagagaaattaacaagttacgtcagcaggcactctatggcaatgactttacagagcagtggcgttccccgtgaaatgattggtcaggtgatgggtcataaggacttgagcacgacaaacacttatttggatagttttggagatgctgaaatagagaaagttacattgaaatcattatataataataaagaattaaaattatgagaaagaaaaaatatgaaaattttatcgcgaaattgatgatgactaaagatattattgatgctgccgaattggagaaacacatccgtaatgttgtcggctatgataagtcttcgcttgaaaaagaatattttcggataaatgaacttattgaaaatcaatatgaaaaatacggcataataaatgagggtgataatatagaggcttttaggagaggttattatgccttgaacaggttgtctgtcactttagacgatatccgtaataagataaattcgctgggatatgaaaaggagagtggaattggaatacgtattcagcaggattggaattatgccgcgcatctattgattgatttgttatatttggaaaatataaatcttcataattactcatgtttattaaaggattgtcttaaacgaaccggcaattctcccatgtattcctgttattcggaggagcaattgaaacttgtttatgaatatctttgttctaaatctctgttttgtaacaaagatgaattcagtaatttttttaagatatttaaatctgaagcttctgatgtaacgcataaaataaaagtgaatacctctagaacaggtgcaaaggctctattgagagttgctgtcgaagagttgactaaacaattttctgcttcattggttaacttgttttttgcggataaagatggtggtgatttgaaaatagccagccatcatagagccacggcttatgatgattatcggagggaaatagctcgtatactgtcttaaaataacttccttgaattaaatgcgcttttttaaatcgatatatatgtttgatattcagatgtatatatcgattttgtttttgctttgtgtcgcaacatgaatttgaaaaattaattgtagtgccctttctttgcatcataattttaaaaaaaagatatgataaaaagaaaaaaagctgtttctacagcagaatcaagtaaggaaaaaggcatgagaataaattcaggtgtttcagaaagcatcatgatagtgtctgatattattggtatagacgaagtctgtaaaataacaagtctttctcgcagcacgatttataaaaagacttctaatcacgaaattcctttttataaatccactctgaacaaaaggtccttcctgcgttttagacgttctgagattctaaattggatgttgcgccatcgtatagggactattgatgagtttttggaatctcaggattgagtttataataataagtgaaataatattattatattaataataaaggaagaggatacttttatgtatgatacaataaaatttgtaataaaagaaagtgaattggataatgcgatttgctttttagaagagattccgtgtaggatatcgataaagtctacttcttcaaatagagtggtaggttttttgaagaatatgaagattgaagtgcgaaatactactttgatagtgcaaggtagtttgcttaaatatttcaagggttataattatgcagagtgtttgtctgtatgggatgtcagaaaatcgataaataaattgagtaatgagttgaatgttcctatgcgacaggctgtaatcaataggattgatattggtatctgtttttctatggttaatgttccttgggtatattgggattgtctgcttcatagcgatggttattttcgttctaatataaaacaagaaactttgtattttgacaagtatgattcgcagctttgcttttatgataaaaagacggagatgaaaaagaatagggaggttgagaatttagaatgtttaaaaaaaataaacgtgctgcgatatgagtttcgtttcaaaaaagttacatcgatttttggcggtgtagtaagaggggctgacttgtatagtcctgttttctatttgcgagtattgcaaaaatggtatgatggctacatgattatacagaaaggatttgtatcggaagttgatttactcaggtttggtggcaagaaagagtttcagcgttcttgtgttgctttagtaatgggtcaatttaatctatatgaagttttggatagggaatttgcacaaggaaaaatcaatagtaaaaataaatatgatataaaggaggttatgaaagaagcagagaaattactactggataaggaaaactttatttctattatagatgaattgactaataaggtgagtgttttttatgaggaaatgaaaaagtctgtggaaaacgtttctccatatcgttgggagttattgaatagaatggctgatcgttctttaagggtttaaaatgtagttttaacaaagaaacagacgcaagataggtaaataatcacttttttgtaggaaatggaataaaacgtaattaaacaggcttttcagtagtttaatttaatgcttgtgagattttctatcaatgttcattagaaaaaaacttggtgtttccttttcctatttcttttacttagaaaaaattatgtaataaatgttttgataggaataatttattaaatatatttgtatattaatggaatgaatcagcgataaacagcgtgtttaatactggttttagtaaataatagtatacaaatatattgattatggaaaagaagagtagtggttatcagactggaattgcgagtgagcatttggttttgtctatgttgtatcgtttgggtgcaaaagcatatttgactttgggtaatgaaaagagtattgacataaggattactaaggatgacggaagttggatttctgttgatgtgaagtctgtacgtaagggaaatgctattcctgtagggaatgcagtggataaggataatcattattatgtttttgtaatttataataataagtttagtgatttatctgttcatcctgatttttatattgttcctagccatattgttgttgagagaagaaaggaatttaatggtggtcctattgatatattcaagaaagatattatagagtatcagaataagtgggaaattttgggtacatttgtagaaaatggtgaactttctacagaaaaaaaatgatgagggataattttaaatgtagaatttatggagatcttgttcatgtcgtatggcaaataaatgaggtttattcctaaagtggctatacgtttttggcagagagagtggattttaggaaatggaaggatggaaagtgggaaatggtggagggtaaatttagttgttctatatacagtattcttgtatatttgtcttgtgtgatattatgtttcttgtttaatgaattgattttttattaatatgataggcgcgcttgcaggtgatattataggctctgtatatgagtttaataatataaagacgaaagattttcctttgttcagtaaagaatctttctatactgatgattcgattatgacgatagctgtggctgattggttgcttcatggaggtgatttggtgagagtgatgcagtattatggttctaaatatccttttcctatgggtggatatggtgctcgtttcgacaaatggctgcatgaaaagaatcctaagccttataatagttggggaaatggttcggcaatgcgtgttagtcctgtgggatggtattttgattctttggaagaaacaataaacgtggcggaagagacagctgtggttactcataatcaccctgaaggaatcaaaggagctcaggctacggcatcggctatttatttggcaagaaaaggtaaatcaaaagaatatatccgcagttttatcacagataattttggctatgatttgaatcgctgttgcgatgatattcgttgtgattataaatttgatgaaagctgtcaaggtacagttcccgaagctcttattgcttttttagagagtcggagttttgaggatgccataaggttggctgtttcattgggtggtgacagtgatacactggcttgtataacaggagggattgcagaagctttttatagatatagaattccctatggaatacgcagcaaggttctttctttattggatgatgatttgcgaagaattgttaaggaatttatagatgctaggcgcgaatggtttatacatcctagatgggaagaagatggagaatcaatatcaatagttgttagtgaaccttctaaagaagaagtagagaagttaaaaacagagtctgtaagactaattttaaacagcttaaattcggaaacggatgaaaaaaaggaatgaatttgatatattgtgaaaagtataaatgctatttgatgtcttatcaagtagcattttttgttatatagagatttctattttgttaaagatgatatggcgtttaagggatagatggaaaatgtttataggagaatgatattggtattggaatggtctgtgcttgtttttatgatgaaaacgataattttagaaataaactttgggtgttaacgtcttatgatgcttctcgaaaagaagaagataaattaagaaaagtagtctccgaagaaactgcttttaagaaagaggtgaatagcagtagtcccttgcaatattctttagagaagggtgtgacgttatcaactttctctcccgactctctatcacaacctaaagatacaacaaatataaatattgaacaataatttatggacgaaattatagaaaaagcaaaggctgactcacttcacttattgggatagaaaagatattagaaggctaaattaagagataagttgtttaaaaaaatagtgaatgaataatgaaagaggtgtaagcagtcaaaaattggctcataattgaaatctctatcttcgctgcgaacaaaaattttaggatttatgtatagcagtgaagatcttgaaaggttttactttcagtaccagaccgaggctttgcctcatggagaatctctccaatcgttttgtgttaagaacaaagttccttataacatctttcagaaatggtacagggatacccggaaaaaagtagttgaagtccaggttgatggtgctcctgtaatcggtcatgaggaacaatccggtgccattgatcaacctcaaccggtatcaccaggcagaactgatcaccctgttcgtatttgggttgagattcgtatcagcaatggcttgcatttgttccaaaagaatttaagctacccggatttggttcgtatggtagagaaactggaggggttatgctgagtgttaccggtctgaatcatttttattatgtccgtgatttcaccgatatgcgttgtaagcacagccgtgtgttgtctatcattcgtgaacggcttcaccgggaacccagagatggggatgtctttatagtcatgtctcgcaatcgcagaatagtccgtatgttttcatttgataatcgttcatatagtctgtttgaaaagaagtttgttgccggttatcagttcatgaaagttgagcgaaatggggcagatactgtttatcggattgcctggaaggacgtggttttgattcttgagaatcctatagttaaaacattaaaaatcagataatcaatctatttatccacttgcggttttgcgattattttattacctttaatgctgtaagtcaaaggtttaagtatgatcgatctgcaagatataattacaacaaaacgagagttgttgagtcgggaaacctactcacgcaaccctataaattatagtgcaggtatggcagaggatcagaaagaccgatacatacaataccttgctgagcaaaatcaggatctcaggttgacaggtgatgccatgaggcttgttttggaggattttatggctcagatgaaagaactgaaggatcagatgtcatccatgcaatcgaaacatgttgaccttgagaatcggttgtcagaagagcataaacttcgcaaatcggctgaacgtaagataaaatcacttcaggaaaaacttgattacgccaatcaggaacgttttggtgatagacgtcaaaagatacaatctaaagctaaaacaagtgattcagaccgccggaaggagaaggatgattatgatggaaccgatgatacgcttcgcacggattcggttggtcatgttccatcccaagagttaaaagagccttccgggaaagaccgtgacttgtccaatcgccctgacggttataaaacgatgggggtagccggagaagcgacagagcatccttccgatttgacaaaggttcccggtcggatcattgaaaggagaatggtacgggtgttcagtttccgtactttccttacggaagaatgttttgagatggttcattatgcagagcctggtaaaaagccgaagtggggctatttcccttctgaaggccatccggatgtagtaaccagttttgaaggcactagggccactcctgaatttctgcaggttatcgcctatgaagtttatgtaaagaatgtgacttttggtcttcttcaccaatggctgacagatatgggcatgaccatttctaaaaacacgttgcgcaactggcttaagaaaggtaagacatacctggacgaactggtttgtgtattgaagtctatagctttggaaaaagattcgattgtgaactgcgacgagacctggtgtaaagtgcgtaaatacgatcactataagaagtgctacatttgggttctggtcaacaaggcccggaaaacagccattttcttctatgagaatggctcgcgtggtcgtgatgtacttacagactttttgggcgatgcagaattgaagagtataatgtccgacggatacaatgcttatgtatttatcggcaatgagctgaaatcagcccggtttaaagatactgtccaccaggtttgtatgtctcatgccaagaacaagtttgtcaaggcttccaatcagggtggtgaaccgactgcagaacgcttttccgaaattttaaaggagttctttatgagggagcgtaaatacgatgatgccggattaactcccaaggaaaggtttcaagaaaggcaaagcttggaaacgaaggaactcctaatagagctgcgcagtttgttagatagtgaacagtcaaaggattcagaatttagaagccggtattataaagaagctctcaattatctgaaccggttctggaaagagatctttgcttacctggatgatggtgaattaccgatagacaacaacctggctgagcgaaccattcgaaagctgaccactcaacgcaacaattcacttcattatggtagtgatgccggtgcagagatggcagcaacttatcacagtgtgataggaacggtaaagcttcatggcagttctatctggaacttcatcggaacttttttcaaaaatatctttaacgggtgcagggattatgttaacatggttcctgacaaaatcactttggctgccagccaatgttaaattcaaaactaattaattaacaaaactcggtttagggcactgaaaagtgccctttcgaagggggatgccctaaattgagtgcttacgaaagaggtgacattactgatacattgaataaatgttgtcgaaatttgttgtctaaaataggactatggtctatctttaggcaataacaataagttttaaaaaaatgaatatgttgatgattgatttgcatctatttgcattaaattgtaatgaaagttttaggatagttgtagatgaaaaagaaaaaagagctaaactttgttgtttaactctttctatattagtgttttatgttaaatgttttataataaatcttttgggccccccagacgcgtactctaaccgggctgagctacaccccgaattgcggatgcaaaggtacggctttttttggtatttgcaaatattctctgtacttttttacattaaaagtgcatctttttatgcaaggtattgatgaaactaataagtcgattccctatattcagagggagacatattggtgtgtcttttaaaaaaacgacctaaagcagactggttcaggaacttagttctgattgttatttcctgaatattaagagaactgtttttcaataattcttttatctccagtaatgaataatctataatccagtccttaggagattttccactggtttctttaactacttcagacagatatttggaagaaacatgaagtttgtcggcataaaagataacctctttatgctctctgtagttgtccatcattagcgtatagaatctatgcgttaaatcttctttacgtgttgtacttgtattatttctatgattgatataattttcaaaatcgttatataaatctaggaatataattcttagcagagctataattgcttctctggaaaaacttttgggaagtttgatccgactcttcagtaacgtataataattcatgaaatactgcatctcttgttccggcaagggataaaggaaacgagatttcatgtaagagaaaaattgaggagaaaaactcctgatagtttttattacatcatagaaaaatgtgtttgaaagtgtaaaatagtttgttgtgaaatgaggacttgtctctatgactgagactagcagtcccggcataaagacaaaaacatcatgtgggtgtatagtatattcttgagaatccattcttattttagcatttccttgtatacagattccaatagtacatataggggtataagaagggcaatctgtaatgggcaatgttgatgcattagattgcatgcaaaattcattctctaatatatcttctctattcttttcaaattccttatataacatttataccaaccaattatataatgcaaaaatagggtttctgaagcattgaaaagttgatcaatggtatttaggaacaattttacggaaaaaaggtgctttatatttgtcttttttaaatgattggtctgttttttaactaatgtattataaatactctaattgcttgattgttaaaagtttgatcgattataattgggaataaataaaagatgtttttattgtatcggacagatggaaagtttgtacaatcctttccatctgtttgaagggagatcagcaacccatggattcatgataaaaatccagcatttcaaaaatttcgtctttacttgccgattgattaatctgtatatttcctatttcagttaatagggtgaaattgataatgcctgctgagtttttcttatcatgtttcatgaattcatagaggcgttcatattgtttgcaattaaaaggcataactccataatgttctttgacgaacaggatggtctgacgtagcttgtctttaggaaaaccagttttgatatgggagaaataaagttcacaaactattccccatgccacagcgtaaccatgtaatatcggatgctgtgtttctaatgccagactttcaaaagcatgccctacggtgtgtcccagatttaaagctttgcggattcctctttcaaaaggatcctgttccactatatcttctttaatctgtacagattttccgactaaagtctgtaagaccttgtaatctatattgttgaagtcaaatttcaacaattctatccaatgatcatgggtgctgataagaccatgtttcaacatttcagcgtatccggacaatagattgcgaatatccagtgattttagaaaattagcgtcaatcaatacactttcggcaggagagaagactccgatctcattctttaatccgttgaaattgattccggtcttgcctcctacagatgcatcaaccatagccagcagtgtggtaggaatattaatatatttgatccctcgtttgaaagttgatgcggcgaatcctcctaaatctgtaaccatccctccacctaaattgataagtagcgaatgacggcttgcacctttatctcccaactctttccatacatatgccagtgtttccaagtttttgtgcacatcttcagcccctatataaataaaatgggcatttttaatacaatcaaattctgatacaacaggaatgcaaagttcacgtgtatgttcgtcagccaagacaaataatttgtcatgtgggcattggtttattgccttattgagattttcttctaagttatggcagataataacttcttgtttactcatattttctattatttgcctgcaaatttaggtaaaaaagcaaaaagatgaccgttctttgcttacaaataattacttttgtacgttaaaatataaaataatgaaaggaattttaccggtttattgtaggacgatgggatatgttgttctgttgttgtctgttttcgtaccgttgttcatgtttatgtttggcatgataaacgatagtaacctgttgtttacaaaggcttctatcaagttacttatctggttttctttgtttatgatcttcttggcaaaagtgaaggatgagaatgagaagatttcccgaatacgtatcaaggctatttgttatgctatttatttgttgggcatttattatattgtaatgttggtcagaggagtatataatggaaatctggaagaagcggataattccattgctatagtttatatggtttttaatgttatttgtctggaatttggtgtacaaaaaagccgggttgaccgattgtttaagaaataaatacatttttccgttaaaccttttgtcgacaagagtgtccaaaggacattaggcattaaaatttcaaggaaaaagaaaaaatgaagaagttagtattattgttgttactggtatgtacctgtgcaactctctcttgggcgcaaagtggcaagcgcataaccgtgacgggatctgtgattgatggtgatgataaaagcccggttggacaagctaccgtacagttactttctctacccgatagtacaatggtggtaggaaatgttaccaataacaacggagtattctctattgctgcccgtccggggaaatatgtacttaaaatttcatttgtaggttaccttactcaggaaaaatctttgcagctgacagctggtaaaccgagtgttaatattggaacagtcactttacccaccgatgctatcatgttgggtgaggcggttattgtagccgaggctccgcaggtaaccatttcagaagatactattggctataacgcttctgcttatcgtactcctgagggggcgatgttggaagaattggtgaaaaaacttccgggagcagaaatagatgaagacggaaacataaagatgaacggcaaggaaatcaagaaacttatggtagatggcaaagagttttttggcggtgatgtgaagaccggtttgaagaacttgccagtcgatatggtggaaaaactgaaaacctatgataagaaatccgatttggcacgcattacgggtattgatgatggtgaggaggaaacagtgctcgatttgacggtgaagaaggggatgaatcaaggctggtttggaaacgtggatttaggcgccggaacggaagaccgttatacaggaagagctatgattaaccgtttttatgataaaactcaggtttctattattggttccgccaataatgtgaatgatcagggattttcggggggaggacctcgttggaggcgtaacaatggattgaacgcgactaaaatgctaggagcgaattttgctacagaaacagaaaaactggaattgggaggtagtatgcgttacaactatcgtgatgcagatgtagtaacagtcggatcttcacagcgttttttgcagtcgggggattcttattccaattcaaacaaagccaatagtaataaggaaacaggtttcaaggcagatttccgtatggaatggcgtcccgattcaatgaccaatattattttccggccgaatgtttcttatgataagacaaggggagcttcagttgcagagtcaggtacttttaatgaggatccttatcagtatgtggtaaatcccaatgattatttgaactttgacaatatagggtctgatgatccgttaagggatactcgtattaatgctaccaatgaacataatctgtccaaatcaaatagtttgtcggctaatgcaacattgcagctgaaccggaaactgaataatgagggacgtaacattacattccgtggttcatttggatatggagatgatgacagcgatcagtatgctcaatcggaaacccgttattatcagataaagaactatttaggaggggattctatagaacatcgtaatcaatacattacgatgcctactaaaaattataattatacagcacagtttacttatagcgaacctatagcacgggctactttcctgcaatttagttatagattccaatataagaatagcaagagtgataaatcgacatacgatttggggtatccttgggatataaatgacggattacccgaaaactatgaaactgcttatgtggatagcttgagtaaggatgctgaatataaatactttaatcatgatatttctttgggactacgatttatccgggagaaatatcagttgagtgccggcatgtccttacagcctcaaaatacgaaattgtcctataagaagggagattacatgactgataccacaagaacggtatttaattttgctccgaatctggattttcgttatcgcttctccaaagtaagtcagttgcgtatcacttatcgtgggcgtagtagccagcctagtatggaaaacctgttgccgattgtcgataattccaatccgttgaatatccgtgtgggtaatccaggtttgaagccttcgtttgcccataccatgcgtttgttttataacacttataatgccgagaagcagcgtggcataatgactcatgtaaatttcactgctactcagaatagtatcagtaatagtacggtatatgatgagaatacgggtggtactacttcaactcctcagaatatcaatggaaactggaatgcgtttggattgttcggttttaattcggctttgaagaataaaaagtttactataaattctttttctcgtgtgagctaccggaatcaggtagcgttcttatacaataaggaaacattgcatgatgataagaatacgactaccggtttgactttggcggagaatctgaatgggtcctatcggaatgactggtttgaattttcattgaatggttctattgagtatacagcggaacgtagcaagctgcgtcctgaaaagaaccagaatccttatacattctcatatggagcgagtaccaatgtcactttaccatggcagatgacattgtctactaatatcaccaaccagtcccgtagaggatatgatgatgccagtttgaacaataatgaactgatttggaatgcccaaatagcacaaagtctattgaaaggagctgcaactgttagttttgaaatgtacgacatcttaaaacaacagagcaatatcagccgttctttgacagcggatgtacgttcggttaccgaatacaacagtatcaacagttattgtatggtacattttatctatcgtctgaatatttttggaagtaaagccgcccgtgacaagatgatgaatagccataggggattcggcggtcccggttttggtctcggtccgggaagacatggccggcgtcctttttaaatgaaactatatcttaatcttttcccaatctatattgttataggttgggattttttttataagtttgcttataagtaaattactggaattatatggtagagtggagtatctttaatgaaatctttgctgttgcttttaacgtgctttattttgtgattatcatcggaactatctttatagtgatacttgataatcgtaatcccgttaaaacaatggcatgggtacttgtgctctttttcctgcctattgtggggcttgtgttctatttctttttcggcagaagcacacgtaaggagaaattgatcagcaagaaagggttcacccgtctcataaaacgtcccatggcagaataccaggcgcaaaaggcgtttaagtgtcctgatgaacagtaccagttgatgcgttttttccggaaagtgaataatgctttgccctttgaaggaaatgcgacggaagtttttacggatggttattccatgctgtattcattgatgaaagaaatcagtaaggcaaagcatcacatccatttgcagttttatatttttgaggatgatccggcaggcaggttgctgcgcgatttgttgatagataaagcgcggcagggagtagaagtgcgtttactatatgacgatgtgggctgctggaaagttccccatgctttttttgatgaaatgcggggagcaggtattgaggcacgcagttttttgaaagtccgttttcctttatttaccagtaaggtaaattatcgtaatcaccgtaaaatagtagtaatcgacggtcgtgtggcttatacgggagggatgaacattgctttgcgctatatgaaaggctttccatgggggatatggcgggatactcacattaaaatagaaggaaaagcggtatatgggttacagactgcttttttgaccgattggtatgtagtagaccgtacccttatcacttcctcccgttatttccccgaagtcggaatctttggaaaggctctgatacagattgtcacttccgatcctgtaggcgaatggcgggatattatgcaagggctactgatagctatcagcagctcccgaaagtatttttatatacaaacaccttacctgttgcctaccgaacctattctgatggcattgaaaacggcagctttggcaggcgtggatgttcgcattatgataccggcacgtgccgatacatggataacacatttaggttcgttatcttatttggatgatatcatgcgtgcgggtgtcaggatttacctttatcagaaaggttttttgcattccaagctgatggtcagtgatgatactctttctacggtaggttctacaaatatggacttccgtagctttgagcataattttgaggtgaatgcctttatgtatgatccgtcctcagcattgctgttgaaaggtattttcctgcaagaccagaaggacgccatcctgttgcagagaaaaacatggataaagcgtccttggtatcaaaaagcacaagaatctattgtccggttgctggcaccgttgctttgaagaaagagaagttcacactgccatatgcacggcgctcaataaaatgggggtcatcctcaaaatgattctctttgccatgttccagtaccagtaatccgtcttcctttaaaatcccgctttcgaaaatacgggtggggatgctttccaactctttcaaggcgtatggagggtcggcgaagatgaaatcaaattgctcgctgcatttgtctataaatctaaagacatcagcacggataggaaaacatttgtcagtcttcacttcacgcatcacctgtgagatgaaagaaaggtgctggggatctttttctactgaaataacccggtcacaaccgcgtgaaaccagttctatactgatgctgcccgtaccggcgaaaaggtccaaggctgtaactccgtcctcgaagtcaaaataattgttacttaatacattgaaaaggttctctttggcgaaatccgttgtcggacgtgccttgaatgtatgaggcacatcgaaacggcgccgtttgtatataccgctgattactcgcataataataaggtttgcatgtcaaaaggtatctcttctattttacttatctcggagcggttgaattccgctttggggctgatgacgaatacctggcgcagataattgcgcaactctttcagtaattcttctttgtcctttaatattcctgtcaagtgcagctcgtctctttcctgattataatttaattgttgccatacatataataggtaatacacacggtctgtggtttgtttgcatggaaatgagttgatcagtaataagttgcccttatcaaaacaaaaaacttccatttgttgctcgcgtatgtatgtatatagtttccggctgttacccaaccggcttttccgggcgaaatattcagtcagcgggctggcggtggagaagaaacgagccgtaggaaaatgttcagtcagtaacaaatgggtatgtttgtccatagcaaaaagtattaccacattgcttcttcccaggacattgcaaagtacaatctcgttatttcctttagctttaggaaaattatgatagaaaattgtatccatctgttcgtcttcgaataattccaaaggaacaggggtgaaacggggggagtcatacaagatgttaacccgtttatacggatacttcagcgcttctgttttagtcagcatatctttcagattggccgtcatggaatatccggtgttgaccggatgcggaacaaagcagaaatcattatctgtcagtgggttatagatagaaaaagaaaatccatccgcactgaggcggatggataatgtatattgttccgattttgtaaaatcgatacgttcagtcattcttattcccagttacctgcgttattgttaggctgttcgatatcacccactcttaaaccgcaatatttacccaatttggtctgaaggtctttaaggttagccaattcttgagtattcaagccgcccaaatatgtttcatacggagtttgagcttggaacaagttcaaaggagcacccgatttggtagtatcgctgcgggtaaccatctcaaattgtacgccgtttccgaagggaacatatctcaaagagtctgcgttgaagcccggagcatagattgtatctgttacggcaacccataaagtatcacgtttgaagttcatcaaaccttctttttcaacttctttccagttaccggtctttttggctttgttgatgattgccatcgctttcttttcagtcataccggcttccagttgtgtatcagacaaaactccttctttctttacaaacggaagttttgcagttttgacgaaatcaatcaaggtgtcgaagcttgcagtatatcgtccattgtgcaggttacggtattccaactgtgccttacggatgtcaattaagcgtgcaataacttgtttctctctagtctttttagcgtcatcgaagttgatcggtcccatgatactgccgtagcaaacgtatatcaaaccgataacgcaagcagccaatacaatattaataactgttttcatgataaatatgtgttttttttagtttatattcgcatcgcaaaaataaaacaaataaatctaataacgcacagttcaaggaactttttattacgcaattatgattaatagttatttagtgcagcaaattaagggaaattttctatataaaccaactttagaacaagaaaaagctgttaaatttttagcagattttctcttttcccgccaatcggactcggtttttctcttaaagggatatgccggtacgggtaaaacatcccttatcggagcattggtgaagaccttggaccagttacagcaaaagtgtgttctgcttgctccgacgggaagggcggctaaagtcttttcacattatgcacagcatccggcttatactatccataagaagatttaccgccagcgcaacttttcaaatgacctggacaacttttctttggatgataacctgcatcagcatactttgtttattgtggatgaggcgtcgatgatcgctaatgacggattggcgggggcggtctttggtacagggcgtttgctggacgacttgattcaatatgtatatgccggaacaggttgccgtctgatgctgataggagatacggcgcagcttcctccggtgggagaggaggagagtccggctctttcggccgataagttacgcgggtatggcatggaagtatatgaggcgcagctcactgaggtggtccgtcagatgcatgattcggggattctttggaatgcgacagaattgcgccgctacatatccgaggaaaattttctcactttgccttctgtccgtgtggaagggtttccggatatccggatggtttctggtagtgagctgattgaggtaatcaatgattgttacggtcaggcaggtatggacgaaacgattgtggtctgccgttccaataaacgggcgaatatttataataagggaattaggaatacgattctgtttcgggaggatgagctgaacagcggtgacctgctgatggtggcgaagaataactatttttggacggagggttgtaaggagattgattttatagccaatggagatatagctgtggttcgccgtgtccgtcgggtgcgtgaggcatacggctttcgttttgccgatgtggtgctggcgttccccgactatgatggtatggaactggaggtgaaacttttgttggataccttgcatactgaaacacccgcactgcctaaagaattgaatgacaggttattttattcggtattggaggattatgctgatataacagtgaaacgtgagcggatgaagaaaatgaaagccgatcctcattacaatgccttgcaggtgaaatatgcgtatgccgttacttgtcacaaagcgcagggtggccagtggaaacgggtctttttggatcagggttatatgacggaggatatgttgactccggattatttccgttggctgtatacggctttcacccgtgctacggaaattctgtatctagtgaactggccgaaggagcagacggaatgagcgggcagtcagtgaggtgttaatgactgatgatatgttttcaaccgtttggttaatgtttttttctttatggctaagcctttttgaacgtttgtattctatctccataacctttggagttaactcccaagcttatggagttaactccaaaggctatggagataactccaaaggcttgggagatagaaatcttcctttttatttcccttatccataaagaagaaaaggcttagtaaaccagataaaaaaactccgccatcggctttcagaccagatggcggagttttgatatatacgaaatatggacgaaattcgaatagattacaatgcagccagctctatcactttatcaacagccgcattcagaccgtcgggattcttaccgcctgccgttgcgaagtggggctgaccaccgccgccgccttgaatcagtttggctgcttcacggaccagtttgcctgcattctgtccggcttttaccaggtcttcgctaatcatgacagtcagcatcggtttgttgttgtccacactacctattacaacgaacagattggcaggaatctcacctttcagctggaaggcaatatctttcactacgtcggcagacatcggaatgatggttttcaccactttcacaccatttatttctttggcattctctaccagtctggctttcagtgcggcgcccttttctttcatgaactcttccacctgcttcttcaatcctgcattttcgtcaatatacttgcggatggcgactttcagatcgggggcattgttgaacaatgccttcaagtcattcagcgtatcttggaccgtatccatcaattcctctactttggcacccgtgatagcttcgatacggcgcacaccggcagcaacagagctttcgctgataatacggaccataccgatcttgcctgtagccggaacgtgggtacctccacagaattcaatagagtttccgaattggacaacacgtacctcatcaccgtatttttcaccgaacaaagcaatagcacccagttcttttgccttttcgataggaagattgcggtattccgtcaaaaggatgttctcacggattttggcatttaccaaatgttccacttcacgaagttgctcgtcagtcactttctggaagtgagagaagtcgaaacgtaatgactcaggggttaccaaagaacctttttgttctacgtgagttcctaatacctggcgcaacgcttcgtccagcaagtgagtacaagagtggttggcggcacaggcggcacgtttttctgtatctacacaagccatcatcggaacgtcaaggtgttcgggcagttttttggtgatatggataggaaggttgttttccttcttggtgtcaatgatttcaatggtttcgaattcgcttacgatcacccctgtatcacctacctgaccaccactttcggcatagaaaggagtatcgctcagtacaatttgatacagtgtctggtttttctgcttgatctggcgatagcgcaggatgctggtttcatattcggtaaagtcataacctacaaagtgggtgtcaccttcctttatggtgatccagtcgccggtttcaacggctgccgcgttacgggcgcgttctttttgtttctgcatttcggcgttgaactcttcttcgtttacagtcatgccgttttctcggagaatcagttctgtcaggtcgagggggaaaccgaaagtgtcatataatgtaaaggcatccacaccgctgatctcttttttcccggcagctttggcatcgttcatagtcttgtccaacagacggatacctgtttccagtgtgcgcaggaaagattcttcttcttctttgatcactttctcgatcagtgttttctgtgcgttcaactccggataggcctcgcccatattctcaatcaatacaggcagcagcttgtacatgaatgcttgtttctgtcccaggaaagtatatccgtaacggacggcacggcggaggatacggcggattacatagccggcttttgcgttgctgggcaactggccgtcggtgattgagaatgcgatggtacggatatggtcggctataacgcgcatggcgatatctttctggttgtcttgaccataggtggttcctgccatttcggcaatggctttcagtatcggttggaacacatcagtgtcatagttggatgtcttgccttgcagtgtgcgcaccaaacgttcgaatcccataccggtatcgatcactttggcaggaagaccttccagtgaaccgtctgctttgcggttgaactgcatgaatacaagattccagatctcgattacttgcggatgatccttatttaccagttggttgccggggatttgagctttttcttcttccgaacgtgagtcgatatggatttcggaacacgggccgcagggacctgtatcacccatttcccagaagttgtcatgtttgttgccattgaggatatggtcttttggcaggaactgttcccagtaagaggcggcttcgttgtcccgttccagtccttcttcgggacttccttcgaatacggtggcatacagatctttcggatctatcttcagtacatttaccagatattcccatgcccagccgatagcttctttcttgaagtaatctccgaaagaccagttgcccagcatttcgaacatagtatggtggtaggtatcatgtcccacttcttccaggtcattgtgcttgccgcttacacgcaaacatttttgtgagtccgcgactcttttgtatttggccgggtggttgcccagaataatgtctttgaactggttcatacctgcattggtgaacatcaatgtggggtcatctttaatgaccatcggagccgatgggacaatctggtgtcctttcgactcgaaaaagcttttgaaagaatctctaatttctttagctgtcatcatgtcgcttataatatattgtcttctagttaatattctcaaaaaggatttgcaaagataattggttttattatttttgtcgtcaagaattgtgcaaaatattgatgtgttgtgcattaaaaacttcaaaaagcagaattagatgcgtaaagtctactatatttataatcctaagacccgaacttatgaccgcatttaccccacagtgaggcagcgtgccttaagcatcttgcgccgtttgtttgtgggaatgggcttgggggcaggcagtttcattatcttattattgatctttggttctccgtccgagaaggagctccgtatagagaatacccgtttgctggcccagtataatgtgttgtcccatcgtctggatgaggctatgggggtgatgcaggatatccagcagcgtgatgataatttgtatcgggtggtgttgcaggccgatcctgtatcggatgcagtccgtaaggccggttatggggggacaaaccgctatgaacagttgcgggatatggcgaatgccgatctggttatcaataccactcagaagctggatatgttgaaccggcagctttatatccagtccaagtcttttgacgaggtggtggatttgtgcaagaatcatgacgagatgctgaaatgtattccggccataatgccggtatccaataagaatttgaagaagacggcttcaggttacggtgtacgtatagatcctatttataaaacagccaagtttcatgcgggaatggatttctctgccaatataggtactcctgtttatgctacgggagacggaacggtggtaaaggcgggatgggaaaccggttatggaaatctgatccaggtggatcatggtttcgggtacgtgacttggtatgcacatttaagcaagtataaggttcgcccggggcaaaaggtggtacgtggggaagtgataggggaggtaggaaatacgggcaagagtaccgggccgcacttgcactatgaagtgcacgtgaaaggaaaagtgcagaatcctgtgaattattatttcatggatttgagtgcggaagattatgacaagatgatacagattgcagccaatcacggtaaggtatttgactagccgtgaatttttaattcttaattttaatttaccatggcctataatccgaataaagaattgaaactttactattccattggggaagtggcgaagatgtttgatgtaaatgaatccttgttgcgttattgggaaaaggaatttcctattatttcgcccaagaaggcgggagggaatgtccgtcagtatcgtaaagaggatattgagaatatccggctggtctatcatctggtgaaagagaaagggatgactttacagggggctaagcagaaactgaagatgaacagggaaaccactatccgtactacggagattttggacagattgaaactgatacgtgaggaattggtcagtatgcgtaaagaactggattacctgacttaagaatattcaccacagattgcacggattaaaaacgagttgcagataatcgttatggacaaatcagtgtaatctgcggtgaaactggtattggttaattcggctggtcttcgaacttttcgatacgggtgacggtttttatctcatctattttccttaggttggtagtgatggattttacatcatccacatcgtgcacaaatagctgtattcttccttcaaagataccatcgttactttcaatattcaacttgtggatatttacattcaattgttgtgaaatgatttctgttaccttgtttaacagaccgatgtggtcaataccttttatgtagatatttacagggaagtacaaggactttcctgtttcccattggacagccaacaagcggttgccataactgcttttcagtttggtagccaacggacattggcgtttgtggatgatgatacgattattgtcgcctatatatcccaaaacgtcatctcccggaataggtttgcagcattctgctatcacatagttcttttggatagcttcgggagtcagtttcaatattttcttgctgtctatctttggtaggggaaccttctcttctgtcggtttctccttgtttgtcttgctgcctccgaaagcgaaagagatatactttttccagttactggaaaccggtttgtctttcagttcgtttttatcgttttctcctagaatgattgttttgaatccgatggctgcaaacaattcttcctgtgtcttgagggtatgcagattacagatctttcgtatgttttcgggagtgtactctactccctccctggagaagaattcccgtaacatttcctcaccggcctgctgcatacctcgctgttcgcgtttcagtatggcctgtatcttagccttggcttttgcagtggtggcaaagtttatccacgaaggctgtacatgttgtgatttggaagtaagaatctccacctggtcgccgctttgcagtttgtggctcaagggcaccagcttgtggttgactttagctccgatgcaatggctgcccaagaatgtatggatggagaatgcaaaatccagtgccgtacagttttgcggcatcgttttgatttcacctttcggagtgaagacaaatatttcagaagcgaacaggttcagtttgatggtatccagaaagtccatggcatccggttgcggatcatccagaatttccttgatggtacgcagccatttttccagttcgccctcgtcctcactgcctccgccttctttatatttccagtgtgcggcaaagccttgttcggctacatcattcatccgctcgctgcgtatctgcacttctatccattggcctttgttgctcatcagagttacgtgaagtgcctgatagccgttggctttaggatggcttacccagtcgcgcaagcggtctgggtgcggtttataaatcttggatatggatacgtatatgttaaagcactcgttgagttcttcttccggatttttgggacagaagatgatacggacagccaggatatcatatatttcttcaaatgtgatatgcttggtctgcatcttgttccagatggaataaggggatttgactcgtgctatcaattgatagctgatacccattttgtccagttgtgcgcggataggtgctgtaaattcacggaatacttcttcgcgttccgcttgtgtttcttgtagcttggattctatctgtgcatattcttccggatgctcatatttgaaactgagatcttccagttctgtctttattttgtttaaccccaagcggttagccagtggcgcatagatgtataaggtttctccggcaattttgtattgcttgttgggaagcatggagccaagtgtacgcatattatgcagacggtcggctattttgatgaggataacccggatgtcatcactcatggtcagtagcaatttcttgaaattctcggcttgtgcggaagcccggtctccgaatatgccgccggatattttagtcaggccatctacaatctgtgcgattttaggaccaaacagattttcaatgtcttccacagtgtagtctgtatcttcaaccacatcatgcagtaaagccgaacaaatggaagttgatcccagtcctatttcggtacatacaattttagcaacggctatgggatgcatgatgtatggttcacccgagcgtcgttttactcctttatgtgcttgtttggcaaaattgaatgcctttgtgatgatttctacttttttgcggtgcttggtcgctagataactgtccaaaagttcctgaaacccttggtttatcatttcctcatccgcctgttcctgagtctgcttttcatccgtcatatctttgcctcctataatctatactgcaaaaatatacaaaaaacatattcaagcaagtattttcagaaaatgtatagtgttaaatctgtattttttatcaatcatctgatccgcaaacttcttccggctctgatattattgccctttataccgtttagattacgtaattggctgatggatacgtggtatttggcagcaattcctcccaatgtgtctccttgtttgattttatgataaagagttcccttggatgagcggtttctgctactggttgtttccttgatggctaccgtttttcttttggtcagatattcattgggcttataagcgaacacgctgtcttggcggtcaatgaaagtactgacaaagttattgggcagacgaagtgcgcacaactcgctgttaccgggaataatatcctttttgtattgggggttcaggctgcgaagctggtctaggttgatgttgcatacttctgccacttgttgtaagtggaggtctttgttaatgtgaatggtgtctgtagcgttgggaagctgtgtttccatgggacagatgccatgttcgcaataataggtcatgatgtagtttgccgctatgaaagcaggaacgtacccacgggtttctttgggcagatagttgtagattgtccaataatccgtggctcctccggcacggcgtatggctttgttgatagtgcccggcccgcagttgtaagctgccaataccagattccagtcttgatagatgtcgtacaggtctttcaggtaacgtgctgccgcccaagttgatttgaccgggtcccgtctttcgtctatcaggctattgttcttcagcccgtatatttttcctgtacccagcataaactgccataagccggtagctccctggcgggaaacagcgacaggatttaaggcggactctataatcggcagatatttcagttcttgaggaaggtcgtataaatcaagtgcttcttcaaagataggcatataaaaattggttgccgcaagcataaaggatactttattgcgcagacggacggcatacatatcaatgaatttgcgtactgcctcattgtaaggcatttctatgatagagggaatacgtgacagacgatccatatagatggaatcacttacaacagggttggtagaggccattgtgcagttctctcccaatgtgatgtgattcttagattgccagtcccagtaaagactgtccatttctgactgcatactttcaggaacatcaataatttcttcttttcctgtagtttgcgagtgaacggtaatactttgggtttgtgcgcttattcccgttgttcctataaatgtaaataaaccaattaaaaagtttttcatgcgattaaaatttgaagctgcattgcaggcctattgtattaggtatcctgctccggccgtcattaaaaataacaggttgtatttgaagacctaagtctttggatatgtcaaaatcagatagttcggcatccacgtatgcgtctatgacagacagtatatatacaccgataaaacagaatatgcttaaatcccgatttcggcgatagaaatcttttcgttttttaaaggtgtcctccataccttccgcgctcatgccatgaggcaggaagtcttcgtagcttttggtatcagggtcatcgtccataatatccagataggcttgagaatagtccttgtacattctgttgttccaggtcagcgcatatgcacatcccacaaacccaccatatactatcggcagtttccaatatttacggttgtatatctgtcctccgccgggaattaccaacgccagccagatggcacggttggagttcgggataaaccggggttttgtttcggcagccattgctttctgtatggaatcatttttacggactaaagcggcagtatcaacaggtgcttccatattttctatcttttgccgttcttccagcagtttcaggctgtcaatgacaagtgaatctttgacttgtataatagaatctgtctttatacccatacggcggttgcgtgccttttgggcgtgaacattcatgcttccagccatcataaggcataaaagcaggaatgtaaacagtttatatgtggatgttcttcttttcaatgtagtaataacgctttattctttctttttcagtgaatccagtatttccatgattcgttccaagtcctcttcgttattgaacggaatactgatcttgccttttcctttggctgtacatgatagctgtactttcgaaccgaagaatccgcagaggtggctttgcagcaaagtgtattcctcggataatttggagcctttcggtttgatcttcttcccaccgctgtccactgtctcgccactgctcagtgccttgacaatttcttccactttacggacagaatagccttgtgactgtatttcattaaagatacgtatttgggtcttaggatcatctaaggacaataaggcacgggcgtgtcccatgtctatttcgcggtttttcaatgctacttgaatctgggccggaagtttcagcaggcgcagataattggcgatagtggtacgttttttccctacacgttcgctcagccgttcctgtgtcaatgcatattgttccaataaatgttgataagccagtgcaatctccaatgaattcaaatcttcacgctgaatattttcaatcaacgccatttccattacattctcgtcatcggctgtgcggatgtatgccggaatagatttaagtcctgcctgtatggaggcacggtaacgacgttctccggctatgatctggtaagagtcttcactcagttgacgcaacgtaatgggttggatgataccaatttcggcaatagagtcggccaactcctgtaacgccaccggatcaaattcacgacgcggttggttagggttgacggatattttgctcagttctatctcgttgatagaagatgagccggctgtctttacttcttcagtcgagatcagtgcgtcaagcccgcgtcctaaagcaaatttcttctgtactgccattgtttacttactgttacgtgttataatttcttgtgccaatgccaaatgattcttggctccggtagagtcggcatcatacaatattgcaggaatgccgtggctgggagcttcgctcagtttgacgttacgctgtataattgtcttgaataccaattcttgaaaatggcgtttcacttcatcataaatctggttggccagacgcagacgtgaatcgaacattgtcagcaggaagccttctatttccagtgaaggattcagtttcgatttaataatcttaatggtattcagcaatttgctgatgccctctaatgcaaaatattcgcattgaacagggataatcactgaatcggctgctgtcagcgcattgattgttatcaagcctaacgacggggagcagtctatcaggatatagtcatattcgtcccgcatgggggctaatacttttttcatgatcttctcgcggtcttccaggttcagcatttctatttctgcgccaaccaggtcgatgtgtgaagaaacaatgtcgagtccgtcaatgtcggtggtataaattgcttcccgtatatcggcttcgttgataatacattcatagatagagcattctacctctttgatgttcacacccaatcctgatgatgcgttggcctgagggtctgcatcaataaccagcacctttttctccagtgttgccagagaagctgcgaggttaatcgttgtggtagttttacctacgccacctttttgattggctaaagcaataatttttcccatattaatcagtttttctcgctgcgaagtaacaaataataggtgattgcacctataaaaaacggcagacattagcaaaactgttgataactcattggttttgttaataactcaacggcggcaaagatagaaattttcattcaattctattctatttttagcactgggttgtagaacattaagataattttcttttccggtgaggggtagttccggcaaagagttgtatctttacgctccgagaaaaagagtggaaaaatatgaagaaagaaaaaccgttgatattgctgtcaaatgatgacggcgtggaagctaagggattgaatgaattgatacgcgggttgcgtggaatgggtgagataatcgtaatggcaccggacggtcctcgttcgggagcttcgggggcgatcacttccgagcatcctgtgaagtattacaaggtgcgtgaagaggaggatttgactgtgtataaatgtacgggcacaccggtagattgtgtgaaactggcattgcatacggtggttccccgtcgtcccgatgtggtgataggtggaataaaccacggtgataattcttcagtgaatgtgcattattccggtacgatgggggtagtgattgaagggtgtctgaaggggatctcttctatcggatattcattatgtaatcattttgcggatgctgatttctcttcatcgctgccttatatacgccgtattactgagcaggtcctggagcatggcttgcctttgggaatttgcttgaatgtgaactttccggatacagcttccttgaaaggggtacgcatctgccgtcagacgaatggggcttggattaatgaatggaagcgtagtctgcatcctcgggggggagagtatttctggctgaccggagagtttgataactatgaaccggaagcggaagattcggatcactgggcattaggacatgggtatgtggcggtaactccgacccaaattgatgtgactgcttatgggatgatgaatgagttgaaaaactggaatctggaagtatgaaatactatttgatagtaggcgaggcatcaggcgatttgcacgcatctaatttaatgcgtgccttgatacaggaagatccggaagcagaattccgtttctttggcggggacttgatgacggctgttggtggaacgcgggtgaagcattacaaagaactggcttatatgggttttatcccggtgttgttgcatttgcgtactatctttcggaatatgaaagaatgtaagcaggacattgttcgttgggctcctgatgtagtgattctggtggattatcccggctttaacctgaaaatagccgagtttataaagaagcagacgaaaatacctgtctactattatatttctcctaaaatatgggcttggaaagagtataggattaaaaatatcaagcgggatgtggacgaactgttttccatcctgccttttgaggttgagttttttgccggacatcagtaccctgttcattatgtgggtaatccttgtgtagatgcagtggatgcttattgtaaggaacatccggatggatttccggaatttgtggcggataatggcttgtccgaaaagcctgttatcgcattgttggcgggcagccggaaacaggaaatcaaagacaacctgccgatgatgctggaggctgctgctccgtttaccaaagattatcaattggtgctggcaggggctccggggatggaccctgcctattattcggattatataaatccgaatgtaccggttaaaatcattttcggacagacctacaggttgttgcagcacgcgcaggcggcattggtgacttcgggtactgcaactttggaaacagctcttttccgtgttcctcaagtggtgtgttactatactccggtagggaaatttatcgcttttcttcgccggcatattctaaaagtgaaatatatttcgttggttaatctggtagccgacaaggaagtggttcgtgaactggtggcggatacgatgacggtggataacgtgcgttcagagttagaatctcttttatataataaggtatacagaaataaggtgttggaagagtatgatcgtattattcagattttaggtccggcaggagcttcggggacagcagcccgtgaaatggtagctttgttgaagaaataaacttttcacgatctctttttgttctttcgggtaaacaacttaaaccctggaagtatatgaaatatttttttcaatctatgttaggggcgatgcttcttttgagcggagtattcgccttttcatcttgtggtaatgatgaaagtgatccggacagtacggtgactatagctatggctaccgtagaaaaacaacctcagtatgatgctccttatttggtgttggacaacggagagaagttgtgggtggtgcagcatattgttccttaccgggatttgaaggcaggagaacggatttttggaaattattcttttttggaagccggtgaaagtggatttgcttataatatccgtttgaatgactataccttagtacctgttcagaaaattatcggattgaaccccgataatatggacagtattggaaatatgaaagtacagatcaaggatatgtggccttctgatgactatctgaatgtacgttttatgttgaattttcccagtccgcagaaacctattcttaatctggttgtgaatgagatgattccttggacaaaggacggatatgcgcatttggaactccgctataataacaacggaagtcagggcagattggtacctggtatggtttcttttaaattaggtgattattcaccggaaaacagtgaattgaaaggaataaaggtattggttaatcctgtggacggggaagaaaaaacatatattttctcttatccgctcactggcgaggatgtaccgggctttaatcctttggatttggcggagttaaaataaagaaactacatacagatagactactgctgccgggattgcgagaatcgcgctgtcaaaacggtcgagcattccaccgtgtcccggtaaaatattgcccgaatctttgatgcctagacggcgttttaataaagattccgttaaatctccccaggttccgaatactaccactgtcaatgctagtccgatccatactccggtagacatgaaagggaagaagtgagatagcaggaaagaagctatgatacagaaaatgccgccgccaatagagccttcccatgacttcttaggagagatgcgttcaaatagtttatgtttgccaaacagcatgcctgtacagtaagcacctgtatcattcacccagttgaatataaaaatagatagtgggagaatagcgttgtattgtgaaaggctggctgtttcgtccgaatggaaagccaatacattcagcaaagcgaatggcaaggcaatatacatctggcttaacatggcataagcccaattattcagcgggttttcttttttcaaataaagttcgctgaccatcagataaataaataaagctaaataaggaataaatatacctgtttgtgaaggatctattccaaaatagaaaaagcacaggaaaagaaaaattccgctgagaatacatatacgtttatttacttgtattccttctacatgattgaccaaattacagaattcattgattgccaatgcgctgataatggcaaataggatgccgaatgagacagcccctcccacgatgcagcctatcagtactgcaacaaaaataattccggttatggcacgttgtaagaaattgcttttcacggtcgttagtcttaagtgattcaaaaatcaaagtagaagatctgtttttttatcattctgagtgaccatgaagaatccggatatatctggattattacggactctttgtatcattcagaatgacaatgcttatatagttgacagatctttctacaatgttatgcttcttttttttctttttccttttcctcagaatctgaagaattcttctcttcaaaatcttcggttacttctactggttttgctgtagcttctaaagccataatttcttctgaacgtgaagtccaggggcgtttgccgaaaatgcgttccacatcttcggcgaaaattacttctttttcaaccagcagacgggccagctcgttgtgaccatctttatgttcggataatattgcttttgcccgatcatattgttcgttgatcattcttttcacttcttcgtcaatcagttcggctgtacgttcactgtaaggcttgctgaaagagtattcatcgttgctgtaataacataagttgggtaacttttcactcattccggcataagcaatcattccatatgattgttttgtcacacgttccaaatcgttcatggcaccggttgaaatatgtccggtgaacagttcttcggctgcacgtccccctaaagtggcacacatttcatccagcatctgctctttggttgtgatctgccgttcttcgggcaaataccatgcggctcccaatgcacgtccacggggaacaatggttaccttaatcaaaggattggcatgttccaaaaaccaagacagcgtagcgtgaccggcttcgtgtaaggcaatagtacgcttttcttcggcagtcatgattttggttttcttttccaaaccaccgataatacggtctacagcatctagaaaatcttgtttcccaaccgcattcttaccatggcgggcggcgatcagtgctgcttcattacatacattggcaatatctgccccactgaatcccggagtttgacgggcgagcaaatccagatcaacactttcgtccagttttaaaggcttcaaatgtactccgaatacttctttacgttcgtttaagtcgggtaagtcaacatgaatctggcggtcaaaacgaccggcacgcaataatgccttatccaatatatccgcgcggttggtagcggccaaaatgatcacaccgctatttgaaccaaaaccgtccatttctgtcaataattggtttaatgtattttcgcgttcatcatttccacccatgcttggatttttgccacgggcacgtcctaccgcgtcaatttcatcaatgaaaataatgcaaggagctttctctttcgcctggcggaacaagtcacgtacacgggatgcacctactccgacaaacatttccacaaagtcggaacctgaaagcgaaaagaaaggtacatccgcctcaccggcaacagcttttgccagcaaagtcttaccggttcccggagggcctaccagtaaagcgcctttaggtatcttacctcccagctccgtgtatttctgaggttgtttcagaaactctacaatttcctccacttcttgtttagcttccgcttgtccggctacatctttaaaagtaatccggttagttttgtctcctttttcgtatacctgagctttgcttttacctacgttgaacggattggcgcctccggcccctgctccgccgctcatgcggcgcatggcaaacatccagataccgatcaacagtaaaaacggagcgatattccaaaataatgcaccgaagtagtcgcgtttcttttcataactgatagatccggtaaaatgaccttcttcctgtgccttttccatgaatttatccaatgactccatggaacctatttcaacgttcaaggctggattacgacctacttttttatagtcatttttaaatacatctttaacaaattccggtttaatgtacatttctaccgtgttgtcatcgtatgcaattattttattggcatatcccttgtttatcatatctttaaactcggtatatgttatttgtttgtcaattcctccttcttgattggaaaagtagaggatggcaaaactcatggcaatgataacatacagccaactcaaattgaagcgtggcatatttatctttggtttattattggtattttcactcattttgattctgtattggattagtctagatcaggaatttgggttagtttggcatctgcccataaatgttccagattataaaaatttcttgtttccggcaaaaagacatgtaccagtacatcactgtagtccattgcaacccattctgcgtttctcagtccgtctattcccgtaggtttgtcatttatttctttatgtacatattccttgactgagtcaacgatagctgtaacttgacttggggaattaccttgacagattacgaaatagctgcaaatggtatcattaatggcggtgaggtccgctattacaatgtttttacctttcttttcttgaatgccttctgttattttttttactaaagtctctgcttcgttcattataatgttattaacaactgattattctaatatatgtatttacaacaatgcacaaagatacttggttttctcattctagcgaaaaaatgtgcattaaatatattcggtttttgttttttttagttagagaatctttttattgttatgttaagtctagaatgatgatacacggtcaagaaggataaggaaggccggaaaagaaggcaaatggagaaaaaaagaatcttgattagaaaaaaaagcttcaaaaatttgtggattaaataaaaagccgtatctttgcagcgtcaaaatcaaagcgggtgttttgataggaaaattgggatatggtgtaatggtaacacaacagattctggtcctgtttttccaggttcgaatcctggtatcccaacagacaaaccacttgtcaaagacaaagatcttctaaaattataattttagaagatctttttttattttgtgttggttatcttaagaattagtagtgttatatgaaaaaagagtctaacgcatttgcgttagactcttttttcatataactgtttttattcgtttttcattgattggtcgatcacctcaatttttttcaagatcaattctaggtctgctttgagtttttccactttacgattcatttccgtaaccaaactgctaccttttttggaagaactggtcaagaagcccaagttgttctcgtatgtttgaatttcattcttcatgttttcgtaagcacgaaccagtttttcgcgttcacgataaaggttgccttccttgctgatggttgatttaaaattgcttaattttttctgtgatgcggaaagattcagcttgtcaaacaacttgtcgatgacaccatgatattgcttgtacagtttatctttttctttaaacggtacatgaccgatgccgttccattctttcattaattctcgaatggtgtttcccgcatcctcttccggtgtttcctgtgcgtcaattgcatttaatttttcaatgatcgcctttttctgaaccatgttttcctgttcaaccgagcgttgtgaagaagtcgccttgttcttttgctcgaagaaataatcacatgcggcaatgaatcgtttccatacggcatccgaatactttttaggtacaggaccgattgttttccattccttttgtaatttgcttagaatatcagcagttgctttccagtctgtgctttcttttagtgcttctgctttttcacataatgctttcttcttttccagattgcctgccatactttccttgatggatttgaagaactcggctttgcgtttgaaaaactcatcacaagcggcacggaaacgttcgaatatcttcacgttcattttttgaggtgcgtaaccaattgttttccatttagcttgcaaagcaatgatttcctgagttttgttttcccagtcttggaaagtagtgaacgtatcgtattccatcgcttccacaatttcacagattacggtcttttcatccaaattacgttgctctttttcttttaaggcttcgaaatgttgctggtgacgacggtttacggctgtagaggcagttttgaaccgggtccatatatcttcgcgcaattcttttgcaacaggacccgtattccggaattcctgatgtaacttttgtaattggtggaaagcggaaatcacatcttcttcatcagccaatttctctgcggcttcacagagatgagtttttatttcaagattctttttaaaatcatactcacggaattcattgttcagctttatcaagtcatagaacttttctgcatagtgctgataatttttccatagttcatttaccttggcagccggcacctgttttatatcgttccattcctgttgcagtttcttgaattcattgtatgctttgttggcatcttcgggagattcggcaagttctttcaagcggtcgataatggcgagctttttcaccaggttatcttctttttctttatcttgttctgcttgtatggcgcttcttttctctttgatagagctcatgatatctttgaaacggctttcagcatcgtccggttggggaataaatgcctcaggagcacctccgccatcaataaatgccttacgggcggcttcttgctcagccttgtgcagcttgtagaagttctgtttcaataaatccaactcttgtttgtctgcattgcaggcgtcttcgttgatttcttttaaacgttcgatgacctcttctttcgtttgtttaggtacatacgtagcgttattttcttctgcagtagcggaagatgataccaaagtttcagatgtctgttccattggaacttcggttaaagggcggatagtttcattcgagtccatcgtatagatttttaaagtaagcgtttttgttataacaacaatttacaaattaaaagaaataaattagaacttcatactgtttttcccgatttttttaggaaaatccttaaaagtggagaaaataggagaatcaagggggataaatgcactgcagattacatagattcatacagattctcttttattgtgattctttgccggtttctgtgtgaatctgtttttctctgaatttcaatctatgtaatctgtagtgaaatgtgtcaggatagtaatacggtgatgcccatataaagcatcatacctataatgtcattggtgatggatatgaacggacctgtagcgatggccggatctatttttagtttttccagtgtcataggaaccagggtcccaaagatggaagcgaacatgactactgcaaacaggctgaatgaaaccgaataagtcacggtggcacttgccccgaaacggatgaaattatagatatataccagcatagaaataatagtagcattgattacggccactacagattcctttactatttgtttccaggtgttttgggcatccagcgagctgtttgccagtccttgtacgataagtgccgaggactgtgttcccacattcccccctgttccgccgataagggggatgtagagggccatttcgggatgtgcggcaaaagtgctgtcaaagttgcccagaatcatggagtttcctattccgcctatcatgccgatgagcagccagggcagacgggctgtagtctggcggaatacattatcgtctgtttccacgtcttgtgacaaacctgatgccagctggtagtcgcgctcagcctgttcacgtacttcgtccatcacatcgtctaccgtaatccgtcctaccaggcgtccgatactgtccactaccggaacggcgaccaggtcatatttttcaatggtttgtaccacttcgtctataggggtatctacatggacggatatcggttctttcctcatcacgtgcttcactttggatacggaagggctggtgatcattttcttcaacgggaacacaccgcgcagccgctggtcatcgtctactacatatacataatagatttcgtccatatcttccgcctggatgcgcatttccttcagacattcgggcatactccagttttcgtttacgattaccatttcggtacccatcaatccaccggcagtgtcttcgtcatatttcaacaaatcgacaatgtctccggcttgttctatgtcttcaatgtgtgagaggacttcttcttgtttgtcctcgtccatttcacggataatgtccacggcatcatccgaatccatgtagtcaacgaaccgtttggcgattgtttcagagggaaggatttccaggaattccttacgggcgtcttcgtccatttcgataaggacatcggcggcagtctcattgtccagtaacaggtatatgaaccgtgcttcttccgcatccagttcattgcacagctctgctatgtcggcaggatgcagtccggcaagcaagtccttcagttgctctgagtctttttgctcgatcagctgctctactttttctaattcctctttattcatcctattcttccgttaatataataaataggtgttattctttcttgtttgttcctttccgggcgatatcattgctatagacaatatccgtcttgtttttcagcgccgcttccacctggttggtcagttcgataaactcttgtacagacaactgttccgggcgtttgttgaaaatggggtctgtgctcaatgggttctctttgtctaaaatggaagaaatagagtttctcaaagttttacgccgttggttgaatgttgtttttacaatgagcttgaacaatttttcattgcatcccagttccgtcgtttcattgcgtgtcatacggatgaccgcacttttcaccttgggaggcggattgaatacatgttcgtgtacggtgaacaggtattctactttgtaccaggcttgtatcaggatactgagaatgccgtatgtcttgcttccgggaccggcggcaatgcgttcggccacttctttttggatcattccggtacaacagggtatcaggtctttgtaatccagcattttaaagaatatctggctggatatattataaggatagttgccggtcaggacaaaaggttttccgtcaaataatttttcgaggttcagtttcaagaagtcgtcttcaatgatattatcttccagggcagggaagttctcacggagataggctacagattcatagtccagttccaccacttttaccggacggtttttctgcataataaactgggttagtacccccatccccggtcctacttccagaattggcaagtcagggcacacgtttaccgtatcggctatatcttttgcaatactgagatctttcaagaagtgttgtcctagaaatttttttggctttactaatcccattccgttatttttctatcgttaataaataggtttatttcgctaagatagtatctttgcatcgtgcaaaggtaaacattctaaattaatatacacagattttggaacgaactcgattaaaaaagattataaataaaggtttgcagattgcatttccgttatttttgggggctgcgatactgatatggatgtatcacggattcaatttttcccgggtgtgggaggtcttggatggaggaatgaactatgggtggatgttagtgtcattagtgtttggtgtgtttagccatatttttcgtggctggcggtggaagcttacgctggctccgttgggcgagcatcccaaaacatccgattgtgtgtatgccatctttgtgtcttatgccgccaacttggttgttccccgtgtaggtgagatttcccgttgcggggtgttggctaaatatgatggtacatctttttccaaatcgctgggtacggtggttacggaacggctgattgatacgctgtgtgtgtcgttgattacaggggtaactcttataatgcaggcaagggtattcgatactttttttaaagaaaccggcacggataccacggttttggcacaggtatttacttcggggcatttctatatcactatcgtctgtgtgctggccgtattggtgctggctttttttctgatcaggaatgtgacggtctttgctaaggtgaaaggcattctccataatgtatgggtcggtgtactgtctttgcgtcatgtaaagcggatgcctctgttcattctttataccgtcggtatctggacttgctatttcctgcaattctatgtttctttcttttgtttcgatttttccgataatttgggagtgatggcgggactggtcatgtttgctgtaggtagcattgcggtagtagttccgactcctaatggggcgggtccgtggcattttgctgtcataacgatgatgatgctctatggagtgggaaaagaagatgcgggaatttttgccttattagtgcatggaatacaaacttttttattaattttgttgggtatatatggattagcggctttgccgttcacaaataaaactaagaagttatgagtacaattctctctctcgctccgcagaatgtgtggaagcatttctattcattgactcaggttccccgcccttcgggttacttgaagaaagtgcaagagttcttgctgaactttggaaaaagtgtaggcgtagagtcattccaggacgaagccggtaatatcatttaccgtaagcctgccactccggggatggaaaaccgtaagaaggtgattcttcaggctcacatggacatggttcctcagaagaataacgatacagtgcatgattttgaaaatgatcctatcgagacttacattgacggagattgggtgaaagctaaaggcacgactttgggagccgatgatggcatgggtgttgccgctatcatggctatcatggaagacaagacgctgaaacatggtccgttggaagcactgattactgccgacgaagaaaccggtatgttcggtgcgttcggtttgaagccgggaacggtagacggtgatattctgttgaatctggattcggaagaagaaggagaattgtatatcggttgtgcaggcggtgaagacctgacagcagtgttggaatataaagaagtggaaacagatccggctgacattgctttgaaagttaccttgaaagggctgcgcggtggtcattcaggattggaaataaatgaaggacgtgccaatgccaacaagctgatggctcgtttcatgaaccaggtgataacttacgatgaggcttgcctggtgtcctggcaaggtggcaatatgcgtaatgccattcctcgtgaatgtgaagtggtcattacggttccggctgaagaagaagcggacgtactggaatttgtgcaggagtgcgaagcattgtggaatgaagaatatcatgtacacgaaacaccgatcagcttcaaggcagaacgggtggaattgcctgcgatgatggttcccgatgaaattaaagataatctggtggatgccatttatgcttgtcagaatggagtgatgcgtatgattcctactatccccgataccgtggaaacctcttccaatctggctatcgtttctatcggtggtggcaaggcggagataaaaatcctggcccgcagttcacgcgattcaatgaaggattatctgaatactgcattggaaagctgtttctctatggcaggtatggaagtaacccgttcaggtggttattcaggctgggaacccaatgtggattctcctattctgaaagccatgaaggagtcttataaggcacaattcggtacggaacctgctgtgaaagtgattcatgccggcttggaatgcggtatcatcggtgcggtggttccgggattggatatgatttctttcggtcctaccttgcgttctcctcactcaccggatgaacgctgctttattccttctgtaggcaagttctatgatttcgtagtagctacgttggaaaatacgccggtaaaagaatagtctttaatatcttataaagatttcgggcgcggatgatagggatttcgtccgcgcctttctattaatactccactttgtcacttttctctgtccattgttggaatgcctttatcgcctcttccgccaaaagaacttcggaaggcagcttgcgtgccgaaggtttcaggcttaactcatcatagataaaagagtcgtcaaaccctatattcttggcatccgtcttgttgtttgcataatacattttatccagccgtgcccagtaaatggctcccagacacatgggacacggttcacacgaagtataaatttcacatccgctcaagttgaatgttcccagtttgcttgccgccgcacggatggcgctgacttccgcatgggcggtagggtcgcattgtgaggtgacacgattggctccggtcgcaatgatttcaccatctttggcaattacggctccaaagggtccgccgccgtttgccacattctctatagaaagctcaatggctttccgcattaattcttctttcttcatagtggttctatttctttagtacagagcaaatatacgatatttccggctatatatgcgggagagggcttattttattcggaaactgccgcttcatgtgtacacttgtcggtttctgctaccattgaggtgattatcagtgcctccggggacattgccctgttttttgtttcagaagcttcagcctctccgcaaaagcccgtcaatagggcaaagtggctgaaggattgcctttggaaattccttcagcccgattatggaagcttcagtttttggttgttcgggatgtgtttgtggaagttcattttctctggtgcttttatgcctgttggaaatgatgttactattaggaagagtttgctgtgactgccgtaatagctttattgcttcaccttagtgaagcagccgttttatacaggtgacaatggatcttcaccaaagtggaatggcgtgttcacctaagtgatggacagaaaatacaaacttatcctgatgaaaaagaatatgtttccggttgtgtcagtttgctcatttaggggtgcgatacggtgacaagtgcctggatataggacttttgaagcattggggaaccaatctgtgcggagtatgcataccccaagagggtgcggctgaaggatttttcttcgggctgaagcattttcaggtgtaatccttcagccggaatgcccactggcaaagggtttgcggagaggctgaagcttttgaaggaattttcctgtcctttttctttgtatcacgaatttgctgaatactcctggttttccgtaatgcgctggtttgggctaatactttgcaccctttcgggtatattatgcaaaagaagctaataaattatacccattagggtgtaattatcgctggttttgctatattggtaccctaaagggtgtaattatgaataattcattgtcattgtttgttaaggaaatgcgcaagcggttcggacttacgcaagtagatttggcagctaaggcgggagtggggcttcgctttgtgcgcgagttggaacaaggaaagcaaactttgcgaatagacaaggtaaaccaggtgcttgccctcttcgggtatgaagtgggagcagtgcctgcaggaaaggagcatagcgtatgagaaggggaaaaatatacctgaatgatatatatctacgcggggacgctgacggaagacgaaaatggttttacctttatctatgatgccggattcttgcgttatccggctggcacctgaagaacttttcattgtatgacacggggatgggctatagtctgacgcctgcataccatttgctgtccacggttattgtcatgcccgaggatacggaggagctcgccggggggcagtggcaaggtaatagagaacatcgcttggaaattccgacgttccatcattaaatggatggaactgatagatgtttccttcctgcccgaagacatgaagaaaccctataaaagactggtgctgcaacgtttgctttggctgcgctgaaagatctttccttttctgttttagttattttaattaaaacgtatgcagtctttaaacatctatttcgtttctttgttaaagaagacttagtacgaactaaaagattgtagatatgaaaattcgttatttatctttgatagtgttactggtaatgagcgtatttgctcctatgcaggcacaaacctatgacaatttgtggaaagaactggaagtattggaacgaaaggatctgcccaagtcggttatttccgaagcaatgaaaatctacgataaagcaaaagcggaacagaatgtaccgcaaatgatgaaagcctatctcactgccatgcagtaccgttcccttttaactcccgatagcttgaaggtagatatgaatggtttggaacaatgggcttcccaaaccggcagtatggaagacaaagctatattgtattccattctgggtgaaatgaccatgcctgccgacgtaaaaaaaggattgggttatttgcaggcctctctcaaggataaagaccggttattacttatcccggtcgagaaattgagacctatggtgagagtgggagagactagtaaacggtattttcgtgataatctgtacaacctgctggcacgtcgtgccatacaaatcatgcagcagtacaggtggcaggcggctgctaaagcaaatcagacaaacagtctgcctgcggatatgacggatatggatcagtttgttacttatcagtttgttcccgtctctgattgtgacctgacggcagctgtcatgcagacttatcagtccttgctgaaagcatacgatacggaaacggagcgtgagggttggttgctgaccgggatagacgcattgaattacctgtaccgcaatttttccggaaacttctcgaatgacgtatgccaacaggaactccggaagtggattcatacttatccggctgtgaaaacagtccctgaagcttatctggctttggcacaattcctacagtatcaaaataatcaggtagagcgcttgcggatagttcgtgaaggaatagccggatacccccgttacgaaggtatcaaccaactgaagaatatagaaaaggaaattctgaatgcaagcctttcactggaaatagctacggcctatccgggtgaacagcagtcggtgaaagtaaattataaaaaccttaccggcatcaccttgcagttatataaggtgaatttacccgttacctctgccgtattgcagaacagaaccacccattttgaaagtaaatatgcccgtttgcaacgcgaggagcatttttctttgaaacctactacagattatttgaatgtcgataccaccctgaccatacaggctcctcaagcgggaatttatttcttaaaggcagtgcccgatgggaagaagggcgtttcggacggaacattaatgaatgtcaccgctttaaagaccatttatcgtcctctgccggatggtacgttggaactggtggtggtagatgcagtgagcggacagcctgtttctgaggcggaagtaaccatttatacggagaagggaggaggttattctccccaacagacctaccaggcggataaacagggtactttgaaactggatttcctgaatagtaacaaatactggtataatgcacatacggcggctgataatgcgatgcccatcttgaatctttggaaaaacgattattactataaagagagcaagaggaaagaagttttgcaattatttaccgaccgctccatttaccgtcccggtcaaaccgtatatgtatccggcttggcttatgaaatggaaaaggattctacgcgtgtgcttgcggataaaaaatatacggtatccctatatgatgcgaataataatgaaacaggaaaagtagaagtacggacgaatggttttggctcgttcagcggacagtttgttttgccctctccttgcttgaccggttattttagcttgcgtgtggccgatacttctgtcagttttaaggtagaagaatataaacgtcccacctttgatgtcacgtttgagcccgtgaaagtggagtatcaagtgggtgactctatagaagtggtgggtatggcaaagacttttgccggtgcgcctgtgcagaatgccagggtacactataatatatcccgttcctatgcctggttctggcggtttatgggcagaggttctgcccgttgggagggagaggcaatgaccgatgcggacggtaagttcagcgttccggtgcattttgaaatagattcggacaggagagaatctccgttgtggtattatacgtacaacatacaggcggatgtgacggatggtgcaggtgagacacagcaagctaatttgtcattgcctttaggaagcacttcaatggtgctgaatatggataatctgcccgataatttggtgaaagaaaagaagctggaaataaaactgacagccatgaatctttcgggtgagccggtagatactccggttacttatcaggtagtcgaaatggagaagcagaaagacggtcaggaaaaagaaggcagaaagatattgaccggtacggtggaagccaacaagagttttgttcctgaggctatttatgccctgccttccggtaattatcgtttgaagctttcggctaaggatacacaaggcagagagtgtacggcatttaagaatttccttctgttttcattgaacgacaagcgtccgcccttcgtgataacggattggttctatcaggatggtctggaatttgatgcagcatctccagctactatatatataggtagcagcgaaaagaatgtctatctgctttatgatgtgtttgcaggcaacaagcgcttggaaagcaaacgtatacagctttcggactcggtgatcagtttccgcttcccttataagaaggaatatggtgacggcattctggtaagtatggcatttgtgaaagacggcagactttacagtcataatgcacagattatgaaaccggcccctgagaagaagttgcagctgaaatggactacgttccgtgacaaacttcgtccgggacaggaagaggaatggaaactgacggtactttatccggatgggcgcccggctgaggctgaaatgctggctaccatgtatgacgcttctctggataagatatatagtgcacataagctggactttggagtggactttcattatgtggttcctttgacttattggaatacatcctatatgcggaatgcttatttgtatgttgatttcccgttgaagaggcttcgtgcggttcctttggaatatagtgaattgatcattccatctacaggaagaatggaggctgtggtggtaggttatggaggtagccctcgtgccgctcttacaggatctttgaagataagaggtaggagtgcggcaaatgctgtgatgaaacaagaggctgttactgatatggtgctccaggaagaaatggtagagacgtctgcacaggaaaatgcagaaatggacagttctgaagaactggcagaaacaggtgatatacagatacgtgaaaactttgcggaaacggcattcttttatccacagctccgcaccaatgaaacaggtgaaatcagtatttcctttgtactgcccgagagccttacccgatggaagtttatgggcttggcacatacccggaatgtggattatggaaagatagaagctaccgctactgccagcaaagagtttatgcttcagcctaatatgccccgctttgtccgcgtgggagataaggcgaatattgccgcttcactgatgaacctgtcggacaagggagtgaaagggactgtttgcatggaattgttcaatccggaaacagaaaaggtattctattcacaaaaacagaagtttgacgtgaagggaggagaaaccgggcatgtgaactttacttttgaagtgagtgacaaatatacggtaatggcatgccggatggtagcggatggagataccttcagtgatggagaacagcgttacatccccgtactgacagacaaacagtgggtgacggaaaccgttcctctgaacgtgaatggggaaggtgcgcatactttctctttggaaaacctgtttaacaagcatagcaaaacggcttccgaacaacggttgaccgtagaatttactgcccatccggcttggtatgccgtgcaggctttgcctgtagtggctcatcctcagaatgaagatgctctttcctgggctaccgcttattatgcccattcattggctgcatatatagtcaaagaaaatccccgtatcaagcaagtctttgatagctggaaggctcaaggtggcacgaaggaaacttttatgagcaatctgcaaaagaatcaggaactgaaaaatatcctgctggctgaaactccctggctggcagaggctaccaatgaagccgaacaaaaacagcgtatcgccactttgtttgacctgaatacaatgaatagccaactggctgtttctgtagagaaactgggagaattgcaaaatgccgatggcgcatggagttggtataaaggtatgcaaggcagccgctatgtaactactcaggtaatggaaatgctggtccggctgaatgcattgactcatcaggatgctgacagccggatgcagcctatgattcaaaaagggttcgagtatttaggcaagcaggcagccgaagagtataagtccatgaaagaagctgaaaagaaaggggctgtcggtatccgtccgtcagagcaggttctcaggtatttgtatatctgtgctttggatggcaaggctccggttgatgaaaaggtgaaccggtatttcatagacaagttgtccggtgagggaaaagaactgacgatttatgaaaaggcgttgggagctatcatcttgcagcaagccggtaaggtggcagaagccaagctgtttatgcagtcattgatggagtattctgttgtgacggatgaaatgggacgttactttgatactcctaaagcccgatattcatggttcagttataaaattccgactgaagtggctgctatggaagctatacagcgtataacaaaagatacgaaagctattgatgaaatgaaacgctggctgttgaagcagaaacagacacagacttgggaaacgccgattgccacggctgatgcggtgtatgcattgatggctacaggagcttcggatttattggcaaatacaggaggagtagagattactttaggtaaagaagtgatccggactccggcagatgatgccatcggttatatcaagaagacggtgtccggtgatgtgatgaatatcaagaaagtaagcgtggataaagaaggaaccggaatgggttggggagccgtttatgcccaatatctggaaagtatggatcaaataggtgagcagggaaacggattgtctgtcagccgtcaattatataaaggagatgaggctttgaatgaatcagctccattgaaggttggcgataggattaccgttcgcctgactgtaaaggctgaccgtgatatggattttgttcagatcaaagatgaccgtgcagcttgtatggaaccgttacaggcagtttcgggattccgttggagcaacgggctgggatattatcaggctaccaaagatgcttcgactcagttctttatcgatcagatgagaaaaggaacttatgtcatagagtatcaggtgtatgtgaaccggacaggagaatatcaggctggaattgcaactgttcagtctgcttatgctccggaattcggagggcatacgggaggatatcgggtgatggtggaataaagacacgggatgtctggaattaattgtgtgatttcataaaaagtaagttagcttgctaacttacttttttcttatgcttctgccgtccacccattctagtcttatttcaaaaccatcttcagccgtgccataaaaatagcggcctgaaacggatggatattcaattataaatgtataaccatctgaataatatagatacaaccaaccgttttgaatttcccagtcaaacttatataccctataaagttcatcattatagtaacagcgttcttccgtacctacaccatgatctgtgaaagcacctgaggtgaatgtgatgtaactgtaaagaggttctccatatcggtcttcaaatcccatatcgccccaccaagtcttaccgtataatcctgaaatgtcaaatcctctttcctcatcgctttcacatgaagaaaaacttatcattgtaatcaatgcaatggcaacgaaccagtaatgttttactattttcataatttatctgatttttaatgcgggacaaagataaaggttattcataagataaaataaattataggctgaaaaaatgggtaaaggatgttttttgtctatctttgctatctaaaaagcataaaataattgtatgaaacatattatactgatagtaagtttgttaatgggagtgactttgggagtacaggcacaacccaaagcattatttgataagacaacgcatgaatttggaactattttatggaaaaatccggtgacggcaacctttaaaatcactaataaaggagataaacctttagtgatatctaatgtgacaacgtcttgtggctgcacggttgctgattggaccaaagaaccgattgcaccgggaaagaccgggattgtcagttctacttttgacgccaaagccatcggacgttttcagaagagcgtaggcatttattgcaatgcctcgaataaacctatctatctggctatccggggagaggtaacagccgatcctaagaattacactttcacacatccttttcaaattggcgctattcgtctggataaggaagaaatagagtttgaggatgccaataaaggtgataaaccgactatggaattgttggttgccaatacgtcagataaactatatacccctgtgctgatgcatttgcctccttacctcagtgctgttgcaactccggaaaaattaggaaggggacgtacgggtaaaatcaagatcactcttgatacggataagctgcctaaattgggcttgacaacagcttctgtttatctatcccgttttccgggagataaggtaggagaggaaaatgaaattccggtttctgccatattattgccggatttctcgcatatcagccagcaggaacgcttgaatccgcctgccattcatctttctgccaaagagttgcagatgggagaactgaaaagcgatgaaaagaaagcacatacgattattgttaagaatgtaggaaaatctaatctggaaattcttgatttgcaggtgtttaattctgctttgggggtccagttgaagaaacgtgtcttgaaaccgggtgcgtctaccaagttgaagattactgctttcggtcaaaatttgaagaaagtaaagggtactccgcgtgtcttgatgataaccaatgatcctaacaatccgaagataattataaaagtaaaagtaacctcaaaaaaatagctatggaacatcctgaaaatagtgaagaatataagggattgacagtgaacaaaggtattgagcaaccatctattgtgaatccttatttgaaactacgtaaaaaacctcgtcgtcgtgagttttccgtaggtgaatatgtagaaggcatcgtaaaaggtgatgtgaccgtattgagtcaggcggttactttggtggagagtgtaaaaccggaacatcaggctattgcccaggaagtgatagagaagtgtctgccttattccggaaattctatgcgaatcggtatcagtggtgtgcccggtgccggcaagagtacatctattgatgtatttggattgcatgtgcttgagaagggaggaaaattagctgttttagctattgatcccagtagtgagcgttctaaaggcagtattttgggagataagacccgcatggagaaactatccgtccatccgaagtcttttatacggcctagtccgtcggcaggttcgttgggaggggtagctcgtaagactcgtgaaacgatcatactttgtgaggctgcgggctttgataagatttttgttgaaacggttggagtagggcagagcgaaacggcagtgcattctatggtggatttctttttgctgatccaactggccggtactggtgatgaattgcaggggattaagagaggtatcatggaaatggcggatggaattgttatcaataaagccgacggcagcaatattgagaaagcaaaactggctgccagtcatttccgcaatgctttacatttgtttcctgctcctgattcgggctggagtcctaaagtaatgacgtattccggcttttatggtattggaattaaagaaatctgggatatgatctatgaatacttcgcttttgtgaaagcgaatggttattttgaatatcgcagaaatgaacaggccaagtattggatgtatgagtctatcaacgagcatttgcgtgatagtttctataataatgaaaagataatttctatgttggctgcaaaagaggaagaggtgctgaatggcaaactgacttcgtttgttgctgccaaaaagttattggatgcttatttctcaaccttgaaataaggttttgctaccaacaggcaaaacaaaaaacgcagattatgattattcattaaatctgcgttttttttattgtctgtggtggatgaaattagatagaaagttcgtgaagtacattcaccaattctctgtctataggcttgtcgttctttatagctttagcgaaaggtacataaacaatcttatcatcatcaataccaatcattacattacgttgtccttccaatagtgcttggatgctggccactcccatacggctggcaatgattcggtcatgcgctgtggggcgtccgccacgttgtaaatgtcctaatatcgttacacgcacatcgtattgcggatattcgttcttcacacgttcggcatagtgcattgcacccccggtcagttcgctttcggctactaatacgatgctactgctcttggatttgcggaaaccatgttcgatgaattcttccaattggtcaacttctgtgctgaattccggaataatagctgcttctgcacctgcggcaatagcgccgttcaatgccaggaaacctgcatcacgtcccatcacttcaacaaaaaataagcgttcgtgagaagttgccgtatcacggattttatctactgcatccaaaattgtgttcaaagctgtatcatagccgatggtggtgtcggttccatacaggtcgttgtcaatcgttccgggcagaccgatacaaggcacatcaaattcctgagcaaagatacgtgcaccggtcaacgaaccgtcaccgccgataatgaccaaagcatcaatctcgtgctttttcatattttcgtaagcttgtgcccgtccttcgggtgtcgtgaattctttgcaacgggcggttttcagaatggtacctcccatttgtatgatgttgctaacattttggcttttgaattcctgaatttcatctgttaccaatcctttgtaacctctataaatgccatatactttcaagccgttatagatggcagaacgtgtgactgcacgaatggcagcattcattcccggagcatctcctccagaggttaaaataccaatacttttaatcgttcccataaatacccattttaatatttttatgtcgcaaagttaacaaattatcagttggacaacgataattttctattttttattggtctatttttcgtttaagattgcttttttacattcttccatcaaccatttgggggtggaagtcgctccacaaatgccgatggaacggacgtcctcgagcaagttccggtctatttcttccggctggtcaatgaggtatgaattcggattgatctttttgcattcttgatataagatctttccgtttgagctttttcgtccgcagacaaaaaagatcagatcatgtgctgctgcaaatttgcggatgttaggcatccggttggccacttgccggcagattgtgtcgtaatattcaaaagtggcatcgggtgagatatgctccttgatatattctatgatttgccagaattcttccaaagacttggttgtctgggagtacaagcgtatgtctttggtgaagtccagatgagcagcttcagcaggtgtttctatgacaattgcttttccatgagtttgacctaccagccccagtacttcggcatgaccgttcttgccataaatcacgatttgtgtgtcttgacttgccggaacattatcatactcctgtttgatgcgcttttggaggcgtaatactaccggacaggtggcgtcaatgatctcgatgttgttggtacgggctatagcgtatgtttcaggaggttctccatgtgcgcgcaacagtactttggcatcgtgtaattgggcaaactcttcgtggtttattgtgataagccccattttttttaggcgttcacattcctgtccgttgtgtacaatgtctcccagacaataaagagtgtttccttttgccagttcttcttctgctttacggatagctgtggtgactccgaagcagaacccagatccttcgtctatctctatgttaaccatttatcgctgcttgaaatttttcggtcagccactttttctgttcggcaatgctcatgtggctgttgtccaataagatagcgtcatccgcttgccgtaacgggctgacttcacgggtttggtctatacggtcacgctcttccacattttccagaattttttcataagaggcctcttgccctttacttcttaattcatcataacggcgctgtgcacgtatggcagccgaggcggttacaaatattttcagttcggcatcggggaaaacaacggttccaatgtcccttccgtccatgacaattcctttggcctttcccatttcctgttgttgttttaccaaagcctcacgtacaaagcccaaggcggcgatagggcttacatgagaagaaacctccatgctgcggatggcatcctctacatttgtatcgttcagaaaagtcatgggacgttgtgtttccggattcaaccggaatgaaatatgtatatcgggcattgctgtttttaacgcttcggtgtcgatacctttttccgaaaagaaccctttctgtagactatataatgtaacagcacgatacatggcaccgctatcaatatagatatatcctatttcacgtgccaagtctttggccatagtgctttttccacatgatgaaaaaccgtcaatggcaatagttatttttttcatatataattaatgtataggtgactactaaaaacgcttcaaagatagataaaagttgggtgtatgtctatgaaatcggatgaaaataaaatgaattagcatatttttcatgtgaaaatactttttatttaaaagatttgtgttacatttgccctcagtgagaaacacttaattttaaaacacaatttatggaagttaaaaaatcgcctaaagcagatctcgaaggtaaaaagagtacctggctgcttatcggttatgtgtttatccttgctctcatgtttgtagctttcgaatggactgatcgcgacaagcaagtgactacggaaacaggtataaccgatgtcgtatttgaagaagaaattatccctattacggaacaggaacaaaaacaagctcctcctcctcccgaagctcctaaggtagaagaagtgcttcagatcgttgaaaacgatgctaaagtagaagaaactgccattcaggcttctgaagaaacaggtcaggctgtggaagttaaatatgttccggtagaagtggaagaagaagaacctgaagaacagcagatattccaagttgtagaggaaatgcctgaattccccggaggtatggctgaatgtttgaagttcttgggtaagaatattaaataccccactatttctcaggaaaacggtgtgcaaggtaaggttatcgttcagtttgtcgttaataaggacggttctatcgttgacccggtggttgtgcgtagtgtagacccctacttggataaggaagcactccgtgtaatcaagaccatgccgaaatggaaacctggcaaacagcgtggtaaagctgtacgtgtgaaatatacagtgcctgtaactttcaaattacagtaataaaatactttaatatcttaattaagaggctgcctttaaaaagcagcctctttttctagaaccccttaatcaaaataatttatggctttttctgcagaccagttattggaaaaggtaaatacttatcttgctacgatgccttatgtgcgcgaaccaaaaggattgtatgctcctatagagtatgtcttgtcattaggcggtaaacgtatccgtcctgttttgatgttgctttcctatcagctttacaaagagaatgtggatgatattttaccacaagcggcaggtatagagacttatcataattatacattgttgcatgatgatttgatggattgtgcggatatgcgcagaaacaagcctaccgtgcataaggtttgggatgagaatacggctattctttcgggggatgccatgctggtgttggcttatcggctgatgaacaattgtccggagcgttatttgaagcaagtaatggatattttcagtcagactgctttggaaatttgtgaaggacagcagtgggatatggaatttgaaacccggaatgatgttactgttcccgaatatatggagatgattcgtttaaagacatcggtacttttgtctgctgcgttaaaaattggtgctgtattagggggggcttcggaagatgatgcccgcaaattatacgatttcggtatcaaaatgggattggcattccagttacaggatgattatctggatgtgtatggggattcgaaagtgtttggaaaaaatataggtggagatattttatgcaataagaagacttttatgctgatcaatgcgttggctttggcagatgggatacaacggaaggagttggaaaaatggatagcttctactgctttttgtccggaagaaaagataaaagctgtaacagctctttatgataagataggcatcggcggaatttgtgaagaaaagattaacgcttattatatcgaggggctttcgttgttggaaagtatagctgtgccttctgaaagaaaagaagaactgaagtcttttgtttgtcatttaatgaatagaaaagtataatatgattgacacgcattctcatttgtttgttgaggagtttgatgaggatttgccggctgtgatagaacgtgctcgggattccggagtgtctaaagtctttatgcccaatattgatgacaccacggtggaagcgatgttgaatgtctgtacggcatataaggggtattgttttcctatgattggatttcatccgacttctgttggggctgattcgttattccgtatttatgagatgaaaaagctgctttccggtgaacatccttttgtggctgtaggtgaggtgggaatggatttgtattgggataagacatatttgaaagaacaacagaaggcgttggatatacagattcaatgggcattggaatatcatctgcctttggtgttgcattgccgtgaagcttttccggagttgtttgaagtgatggaaccttataaaaaaactgagttaagcggtatctttcatagttttacgggtactctggaggaagcagggcaggttttagagtatgctcgttttttctttgggatcaatggagtcgttacattcaagaagagtagtctggctgaggtcttacctcatattcccttagacagaatcgttcttgaaacggattctccttatttggctcctgtgcctttcaggggaaaacggaacgagtcttcttatataaagaatgtagcgatgaaacttgccgaaatctatggtctggattttaaagatgtggatagaattactgccaataatgctttaaaagtgttcaaaatggctgaataagtttttaaagtttattaattttgataggtaatttaaatattggcagggctaattctacgtaagacgaaaaaaaagaatacatttgtagctgaaatcgcttgcagttcccgattttctttgtaatttgcacccgattttaaaaaagatagtattgtgtcgcccgaaaaggagagatgctcgagtggttgaagaggcacgcctggaaagcgtgtaaacgccaaaagtgtttcgcgggttcgaatcccgctctctccgcattgtaatggaaagcacaacagactggaagacaattaaaacaaataaataacaattaattaattaatcttaaaaattagacacacaatgaaaaagttatttgcaattcttgcagtgatgggagtccttactttaggatcagttcagcctgttatggctcaagacgcagctccggctcaaacagaacagactactgaagcagcagtggttgaagaaggtggtggtcttcacaaagagttaaaaaccaaatttattgaaggtgatgccagcttcatgtcattggtagctatcgcattggttttaggtttggctttctgtattgaacgtatcatttatttgagcttggctgaaacgaatacaaagaagttgatggctaacattgaggctgctttggaaaaaggtgatgttgaagctgctaaaactgtatgtcgcaatactcgtggtccggtcgcttctatttgttatcaaggcttgatgagaatagatgaaggtattgatgtagtagaacgttcagttgtttcttacggtggagttcaagccggttatttggaaaaaggatgttcttggattacattgttcatcgcaatggctccgtctttgggattcttgggtactgtaatcggtatggttatggcgttcgataagattcagcaggctggtgatatttctccgacagttgtagctggtggtatgaaagtggctttgattactactatcttcggtttggttgtagcattgattcttcaggtattctataactacatcctttctaagattgaaggtttgacaagtgaaatggaagactcttctatcactttgttggatatgatcactaaatataacttgaaatacaaaaaataattaggagatggctaagttatcatataaagtgtcttactacataatgtacatttgctttgcgctgattcttgtcgtgctgggaatgttctattttgtaggatacaataatccggtaggtgaatataatgcacctgaacatacggaaacattgatttacttaatgtatgcaatgtttggaatatgtgtggcagtaactgtaattggtgcgatagcacaatttggcgctgctttgagagataatcctaaaagtgcaataaagtctttgatcggcttggtcttgtttgtggtagtattggtcgtttcttacggtatgggttctgactctcctgttgttttggccgatggtagtgcttacactgatacaggttggttgaaaattactgatatgctgatttactccatttatttcttgtttggtgtggctgcaatcggtactttagtaaacttgagcggtatctttaaaagataatattatctacattgattaaataatttaaaacgaagtaagtaaaatggcaagaaaaaaaagaggcgtacctggaattaactccagttcaacagctgatattgcctttatgttgcttattttcttcctgataacaacatcaatggatactgaccgtggcttggcgagacggcttccgcctcctcccgaaaacaaggatcagaaagatgatgatattattgtaaaggaacgaaacatccttcaagtccgtctgaataaagacaaccagctgatgtgtggtacggactatattgatgtgaagcaattgaaagaaaaggcaaaagagtttatagccaatccgtatgatgatgaaaatctgcctgaaaagcatagaaagaatattcctttgctgggtgattgtatgattacggaaaatcatgtaatctctgttcagaatgacgttggaactagctatcaagcatatattgatgtgcaaaatgaattggttgctgcgtataatgaacttcgtaatgaactaggtaaagctaaatttggaaagctttataatgagtgcaacgaagatgaacaaaaagctattcgtgaatattatccgcagaagatttctgaagctgaacctaaaaagtatggaggtaagtaatgggaaaatttaataaaacaggtaaacgtggaatgcctgagttgaatacctcttcattgcctgaccttatctttaccatgttgttcttctttatgattgtaacaaccatgcgtgaggttacattgaaggttcaatttcaggttcctcaaggaacagaattggaaaagttggaaaagaagtcgttggtttcctttatttatataggtaaaccgttgccggaattccaaaagaaaatgggtgctgaaagtcgtattcagttgaatgataagtttgctgaagtgtcagaagttcaggactacatttatcaggaacgtgagaatatgaaagaagaagaccagccatttatgacagtatccttgaaagttgataaagatacaaagatgggtattgtacaggatgtaaagcaggcacttcgtcaagcttacgctttgaaaataaactattcagctactcaacgtcagtaatagttatataagcatagataaaaaaggaagctgttaaaaacagcttcctttttttatgttttccattctatttgttatggacgaatttatccgttacctatggctagtaatagtacgtacaatggattttttgaggacaaactcctgtgtggtggctcagggaattgaagaaaaagaatgttcagatctcttgtccgtaaacttctttgtaaagagtctttttaactttctcaaaatcactttccatatctatatctccataggtcattaagagcattggtaggccgctatctcccttacggtagggaggttgtatatagggctttttatgtaaagtgaattccaaacgtttatagaagtgaatacggcgtgtgctcatttcatcattaggctcctctacttccaatacaattggaccttttaactgtttttttatcatttccagcacacgttttccataccctccgtttctgaggctgggatcaatagcgaaatgttcgatatagtaaaaatctcccattgtccaatagctgatcataccaatgctgttaccgttttctaaaataatgttgttgcagaaccggggattattatcagaatattctctctgctgtacggtatcacggcgttcttcttgagggaatgccgtatgcattaatttttccacaaaggtataattaacctcatcttgtgcttttacttgtttaatttcaatcattttatctgtctttgtttagtcttaagttatgaacctatttcgcagtataaaagtttattagtctttctaatgcacgttggcataccgggcagaatgcaggtgcttcgtttatcttcattctgcattcggtagtaggacgataaagtcctttttgtgtatagcctgctccttcatagacacccaccttggtgtataagtcggcattttctgtagctaccggagtaggtatggcagtaccttccggaatcatatctttccatttactgtcgaaatcaattaatgtggtgatatttggctcccaaggttccacttcatatggatattgcgggcttggggcttcggtatatgcatattcatctgctaatcctccaaaactatggccgaattcatggactacaaccggttgaaaatcaggatggtgtgctgtggtcagtgtatatgagttatagatgccacctcctccataggtgtctgtattggctagaataatgatatgctcgtaaggaattccagccaaccaattatgaatactttttacccgactggtagtgagataccggtcggaatagaacgtgttgaaatgtgaacttacagctgtagatttccatttgccttgtcccggtatgctgactccgctgtcttccgaagggcttgccacagcgacaatattaaatttgtccttcagtttcttgaaaggttcatgactgaacagggcgtcacacgctgtctgggcatctttataaaatatatccatctctttttctgtatatccttctgccatgattgctacatcgatgcaatctgcggcatttccgttttgcagaagatagcgatgaggggtaatatggtttgttcccctctgatggatcagaatatcattggggattatttcatgtgtgagtgaggcatttactttatgatatacatcttttagagatatggtcactactgcttcttttttgggataaggcaaaagaaaagaattctcgaagcctctttttatcctacttgcttcttcttcgcttacccattcttggaaaaggctagagaatgacgttcgataaatggtttctcctgttgctttgtctttcattgtgatttcaccgttgcctgccaaaggaagttctgctagatgatgcttgcgtcctgcccattgcggaaggcttgacagttcgtccagatatacttcttgttttttggcatctccggtaaaaatataatctgcccgaagtgttttatcttcgaaataatcactgaaattttgagcgtttacagtcatgctgaataaactgcacaaggtaaaaataaatgtctttttcatcgtctttgcattttctgcaaagataggacattctattaaattattggtatttatacaataaaagttatgaatcgcacgaatattgtcgggaaaagtcatatctttgcagaaaattaaactaaaaagaatgggacatcatcaattagacagtttggatgagcagattttgaggttgatagccagtaatgctcgtattccgtttttggaagtagcccgtgcttgcaatgtatccggtgcagccattcatcagcgtattcagaaattaactaatctgggaattcttaagggatctgaatatgttattgatccagaaaagatcggatatgagacatgtgcatatattggtctttatctgaaagatccggaacaatttgattcagtgacagaggctttgaaaaatattcctgaagtcgtagaatgtcatttcactacgggacaatatgatatgtttatcaagatttatgcaaagaacaatcatcatttgcttagcataattcatgataagttgcaaccattgggcttggctcgttcagaaactattatatcttttaatgaggctatcaagagacaaatgcctatcctcgatttagctgatgaagattaatcgttactttatccggctataattaataaaactatacgggtagagatgtttttcatctgtcgggtgatcttctctgcctgtttctttccattcctctttctttatttcgggaaaataagcatcagcttccttggatgtgtcatcaataaatgtgatatataattgttgggctatatgcattgcctctttatacaagcttgcaccgcctataataaatatttcttcttcttctttgcagtgggataaagcgatttccaatgcagggaaacattcagctccggcaaagactgctccttcccggcggcttaatacaatattccggcgattgggaagtgctcctttgggaagtgattcaaaggttttgcgtcccatgatgatagtatgtccggttgttaaagctttaaaacgtttcaaatcgttgggaagccaatataataatttattttcaaatccaatgccgtggttgcgtgctattgctactataattgaaatattcatagtgatgagtggttagtggtgaatgtttagtgatattagtggtaagtgatgaataagcttgtgcagcctattcaccataactgctaaacagatactttacccgcaatgtgtggccatggatcataattcaccaattcaaaatcttcatatttaaaactgaatatattcttgatatccgggttgattttcatttgaggtaagggacggggttcacggctcaattgaagttttacttgttccaagtggttggtatagatatgtgtgtcacctagtgtatgaacaaaatcaccggtttgtaatccggtaacttgtgctaccatttgcagcaacaatgcgtaggaggcgatattaaaaggtactcccaggaatgtatctgcactgcgttggtaaagttgtaggcttaaacgtccgttggcaacgtagaattgaaaaaaagcatggcaagggggaagattcatgttatttaaatcggctacattccatgcactgacaatgatgcgtcgtgaatccggattatgcttgatcgtttctattgcttcggaaatttggtcaataaagcctccattgtaatctggccaggaacgccattgatagccgtagatatgtcctaagtctccgtttgcatcggcccattcattccagatgcgtaccccgttgtcttgcaggtatttcacattggtatccccttgcagaaaccacagaagttcgtgaatgatggattttaaatgcagctttttggtggtgaccaaagggaaaccctcttccaagttgaagcgcatttgatgaccgaatacgctgatggttcctgtaccggtgcgatcctccttgtgaacaccttcggtcaggatacggtttaataggtctaaatattgtttcatgttcggatattcattttatagattgcaaaagtacacaaaatctttctttttccgagcatgaacccagttctatttaagttttcaccatttcaggctgcatacacgttgtaagccgatgatgataagaaccgcagtggcgataaccagtgattggaaattagcatcacttaccaaataataagtttgggaagtaactatgtcactgattgtctggcatagaatttcaaagccattgaaaatatagaataatgcacaacagacaatggcgcaagttacactgagtatatccgataaccattgggctggttgggggaggcggcggataaccccgcgtgaaaatccattgtcctcaatttcatgtttgttggcaagcatgaaattcttaattaatgtatcatcgttttccatcataaccattctgttttaagaaagttgtcaattttgtttttccgcgtgataaatgggacttgattgttcctgcaggcattcctgtaatcactgcaattttttctatcggaagatcttccataaaaaataaggtgatgcaggttcgctctacctcttttaattggctcaatccccgatatatgtccatgtgttcacctacttgcctttgttctgtttggtaaacagcgtctatttcccaagtttccagtccggacgtttcttttttgctgcgaatatagtcataaaatatattataagcaatacggtaaagccatgtggagaaactggacaaatttttaaatgaagccaagttggtgtatgcttttataaaagtttcctgtgccaagtcgtcgctgagctctgtatctcccaatgtttggtgcaggaaaaaacgcctgatgggcgattggtactttttgaccaaagtatcaaacgcccgggtgtttttaaagaccaccacttgtgctaccaacgctatgtcgttgatttggctcatttttattcttcgttgtggtgagtgtctatattgttctttatgttttgtgtttctttggcctctttgttacgtcccagttcaatattttcaattttcattgatctgactccgttttcatcctggtttattcgggtaggagggaaaggatcatcttttttctttttgtgtggagtggtagtgtaagctatcaatacttgtcccaaccccatacagaaaataaggaatccgatagctgccaatccttcttcttctgtcagtacccaaaggaatactcccaaaccaatgcctaagaatatattcttgatcccctttgtcattacagcatttccttgttcttcggggtcattgaacagttcggccggaatggttcgtcctgctgccagagcctctgcagccagtttgtatttggcttgtttgttcttgtacctgaaccaaagtacaatagctacgataaagaaagggagtccacaacagatgatgagtgcgacaattgctaccgaagtaggaggaccgctattccaatcaccgaaatccgaactaatgtcatgcatggcagcattctgatcttcatctacatcttgcaggttgcttataacgactgtatccatccgagtgctgtcaagggctgaaggtactaatttgattgttttggcatgggttgcgaagcaagtccctatgagtaaggtcaaaataaaaagtaactgtttcatgtttttatatctttattattgttttctgctagttagacggaacgaataaggaaataggttgcaaatagacagaaaattttctgataatcccaaaatatcatcgtatttttgtaacataaaaaggaaggaacatgaaattaccatcagaatttgaagcaagaaccctggaatggatgggagaagaaacttatcgcgcgttggaagcggctttgcagacggagcctcctgtcagtattcgtgtcaatcgtacgaagtggagtggggaagttgcaggagaaccggtactttgggcatctgcaggggtttatttatcgcaacggcccacttttacattcgatccgttgtttcatgctggttgctattatgtgcaagaagcatcttccatgtttgtggaacaggtattacgcacttatattaccggacctgtagtgatgctcgatttgtgtgctgctcccggtggcaagtctactcatgcgcgttcagttctccccgtaggtagtttgttggtggctaatgaggtgatgcgtaaccgttctcaggtattggctgaaaatttgataaagtggggaaatgcagaagttgtggtgacgaacaacgatccggccgatttcacttctttgacagaggtgtttgatgttgtcttggcagatgtgccttgttccggtgaggggatgttccggaaggatcctgtggctgtagaggaatggagtacggacaatgtgcaggtttgttggcaacgtcagcgtaggattttagcggatatatggccggctttgaaacccggtggtctgctgatttatagtacctgcacttataatagggaagaagatgaggaaaatgtggcttggattgctgatgaattgggtgcggagatactgaaagtgccagtggcgtcggaatgggggataataggaaatttggcgggacaggattttcctgtttatcgttttttgcctcatagagtgaaaggagaaggatttttcttggctgtattgaggaagagtgctgccatttctcatgttgttccttgtattcgttgtcaggatgacaaagagaaaataacaaaaaagaagagaaaaggagaaaaggggagcttgtctcaggttgttccttttcccaaagaagtaaaaagttggttaaagcaggcggaggatttccgatttgaggtaagaggcacgaaggtgatagccttccccaatgtccatctttcagaatatgatctgttccgtcaggaattaaaagttgttcatgcgggtgttactataggtgagttgaaaggaaaagacgttataccggatcattcgttggcaatgagcacattgctgaatcatgatggtttctctcgttttgaattgacctatgaacaggctattgcttatttgcgtaaagaagcgatcacattggatgcttctgttccgcgtggttatatacttttgacttataaaaacattccattaggatttgccaagaacattggcaatcgggctaataacctctatccgcaggaatggcgtatccgaagcggttatttacccgaagaactttcttttgtatgctaaaaggagccatagatttgttcgggaagattgtgcatattgtttttcatagactggcgcaatgcttctccgggtacagacttgtttgtattctataatatacaaatttgtttggcttcgtacaaggaaaatgtgattatcagaaaggcttcctgtaggtacacccgtttttccattctgagcagccatacgcggtttttccttttataatcgttcctttgccacatagcgggcaggattttcccaccaattcgttatcggatgggatagtgggagcgggcgtggctgaagaagcgttttttcgtgaggtccctgccttttttttcggctgtttgaccgtagaggttgttgcagttttcgttgctgtttcctctattgtggtgacgcggcggtttgtagtatcacttaaaacgctgtgtactatttcacttaccatttgctttaattcatttagaaaagtcgttgcatcatagcttttcttttctatttcacgtagtttcttttcccatattcccgttaattcggcggatttcaacagttcttcgcgaattagtcccaccagttctattccggtaggggttgcgatcagatttttacgttctttacggatataatggcgtttaaatagggtttcaataatggctgcacgtgtagacggacgtcctattccattttcttttaatgcatcgcgtagctcgtcattatctaccagcttaccggcagtttccatagcgcgtagtaaagttgcttctgtatatggccgtgggggttgtgtccacttctcgtccagtttgggcagatgcggcccgctttctcctttcacaaaagcgggcaaggagtgttcttcgtcattttcacgggcttctgcatcgggatcggtcataccttctggcagattggtttgtggtttggcaaagataacgcgccatccgggatctagaatctgttttcctgtggctttgaattctatactgtcagcttcgcctattacggtagtagtggcaaacttgcagtcgggatagaatacggcaataaagcggcgtgctactaaatcaaatacccgtttctccatttctgtcagatttacaggaggttgtcccgtaggaataatggcatggtgatccgttacttttgaattgtcaaatacttttttggacttgatgagcttttgtcctgccaacggagcggtaaatactgtatatggagttagtcccgccaagatattgggacatttgggatagatgtcatcgcttaagaaagtagtatctacacgaggataagtagtcactttcttttcatacaatgactggataagttttagagtttcgtcagctgaataagcaaattttttgttacattccacctgtagggaagtcaggtcaaaaagacggggaggtgcttctgtgccttgtttttttgctacttctgtcacggtaaaaggaacatttttgatacgttccataagtgcctgtccggtagcaagatcggtgatgggaggaattcccctgttcccttcagcctttttggctttcttggggttctctttagcatcgctttcttcctgagccagttcctcatcgcttttgcggatgatggcagagaatgtggtttcccggtataaagtagccagtacccaatattgttgaggagtgaagttctctatttcttgctgacgctttactatcagtgccaaagtcggagtctgcacccgtcctatcgatagaatttgtctgttttgtccgtactttaaggtatagagccgggtggcgttcatgcccaatacccaatcgccgatagcacggcttaatccggcttcgtataaaggttggaattctttttgatcttttagtttgctgaatccttcgcgtatggcttcttcagtcaaggatgaaatccatagacgtttcaccgggcagtgtgctcctgctttctgcatgacccatcgttgaataagttctccttcctggccggcatcaccgcaatttataatttcatcggcattttgcatcagtccttctataatacgaaattgtttttcaatgcccggatcgctgattagcttaatgccgaaacgaggtggaatcataggaaggctggacagactccatgctttccatgagggagtgtattcatgaggctccttcaaagtacagaggtgtccgaatgtccaggtaacctgatatccgtttccttctatatatccgtcttttttggtttttgctcccagtacatccgctatgtcacgggctacggaaggtttttcggcaatacaaactatcatattttttttcgtttctgttcaaataggattgcaaaggtaataaaaacctcggaagagattttgttttgtctttattagttcttcttttataagaatttaaaagtaggtatcgggggctttaaggtcatttcagtgcaaatgggctgttaggtatggtttttctgttatttgctgtttgacgaatgtcttttgaacttttctctatgatttcagtttcttttcagaatcctataagaattttgcatcaaaaagaaactataaaacaatgtaattatgaaaaagaattggatgttatttttatttttcgcagcttttgctgcactaacttttagtggttgtagtgatgatgacaatagtgatgttcctgaaaacacacatttggtttcaaaagaagtacaggctgcatttaatgcaaaatatccgcaagccaaagacgtggaatgggagctgaaaggtgattatgctgtagtagatttttattgggatggtggagagcattctgcatggttcaatccgttatcggctgcctggtatatgacagaaacagatgttcgttatgaaaatcttcccgaacctgtacttgctgcccataaagcaggcaaatatgctgattggcgggtggatgatgtggataagttgactcgtgagggaatggaaactctttatgtcattgaggtggagaaaggagaatccgagctggatttgttttattcgtctacaggcatattggtaaaaactgttgtagataccggacacgaagaagattatgatgattatttgccgcagcctgatgcaaacggcattatagctattgtcaagcagaaatatcccaatgcgacaattgtagaaatagaacgtgaaaaaggtttgcaggaagttactattttagatgaaaacaaagagaaagaggtttatttcaatgagcggaacgaatggatgggaacaagctgggatgtacaggtggcaaatttaccggaagcggtaaaaaaatcggttatggaaaaatattcagactatgtgatagatgatgctgattatgtggtgacacctgataatgaatggtatatacttgatttggaaaacaaacagatcgataaagagcttaaagtaaaggtagataaggacggcgtttggttgtaattttattatcccctaggctatgctaggtaaacaggcggatgtttcatagggccggacagctttggggtttttaaacattatgatttttgtggcaggcagttgaaatgtgaatttgtatttctgttatacattttttgtgattttgatgagagagtaaaagatgaatgtggaaaaatagatttgtatgatatacgatattcagttacatttgcatttagaataaaaaaacagcatgatggaaacaggattaacttatacttcgactgttgtcgtttcaaaagaaaatgtagctgccaccatgggtagcggcgatttgaatgtgtttgccactcccgctatggtggcgttgatggagaatgctgccatgagtgccgtggcagatgagttgcctgaaggttccactacagtaggggccatgatgaacactactcatatcaagccctcggctgtgggagacacggtttcggctactgccgtattaaaagaggtggaaggcagaaaacttacttttgaagtgcgggcgcaagatagcaagggcgtgattggagaaggtacacatgtacgttatattgtggacaaagagaagtttatgagtaaattgtcttaataattatttgaaattatgccacaactgagagcttcccttcttttgtgattctgaatattatttgttccgataacgggaaatcaagtagaggaatgaagaacgtgctttaataaaaaatatttaaggagagcaaaacgaatgacaatctgaaaaagagtgtcatggagttctgccctccttcttttattcttgcagcgccaagatatattcgtataacttcttataaaacggatgtttcgtcagcgtagaggcatctcctaatataataagtttcatgcgtgcacgtgtaattgctacattcattcgtcgcaagtcatttagaaaaccaatttgtccctcttcatttgcacgtactaaactgatgaggataacgtctcgttcctgtccctgaaaaccatctaccgtattgatggtgataaggtgtcggtaaggcttgaagaaagcatctcgttttatcagttgacggagatattgtacttgtgctttataaggagaaatcactcccacatcaatccgttcttccagaaaacggtctttacctattttattgatatagttggtgagttgggaaatggagagtgccgcctcctctttattgatacggccgaagctttcacccacaaactcttcgttgcattccattccttccgtatttatccattctatcggtgtgtcatagtccaatatactccgatattttacttcgggagctgatttcagttcaccctgatagaaccattctgaagagaaacgcataatttcgtcattcattctatattgtacctttaacaaggatacagtgtcgggtttgttgtctgcaatctcctgcatcagtgtccggtctaatcctccacgagctgcttccatgcatttaatggtaggaggaagctggcaataatcaccggccagaatgacacggtctgctttgcggatggcaatccagcaggcaggttctagagcttgtgcggcttcgtctatgaataaggtactgaatttgcgtcctgtcaatattcggttggcggaacttaccagtgtgcaggctatcacacgtgcttcgccgaacaatgcttcgttgatgcgaatttccagttcggtggcacggtctttcagtgagtttattttctgtcggatattctcacgctccgctcctttgcgcgaacgtccgtagagctcgcgtattgcttttcggatactccataattgcggataatcgggatggctttcaaaacggcgttcataggtaaaagcaagcattttgtcattgacgcgggtgggattaccaatacggagaacgggaacaccccggtccaccagtttctcgctaatccagtctacagccatattgctttgtgcgcaaaccatcacttgattttcccggtgaagggtctcgtaaatggcttctaccaatgtggtagtcttaccggttccgggcggaccgtggactatagcaacatctttggcatgcatcactttatttactgcttcctcctgcgtattgtttaaccaagggaaacgggtgaagccgaaactgaaagtttccgccttttggttgccatgaaaaatctcacgtaactctgccaggcgattcccttttgccttgaggacttgtcccaacgcttcgaacatcaaccggtaactggtttcatcaaaataaagctgtactcccaattgtagctcggttgcctgtatgctgagcaatgcatctgccgaggggagaacgattaccattcggtcttcgtccacgtagttgacagttgccgtaaaattgaaataatgtaattggcctgatgcattttgcgtaaaaaagcataccggacggccgaattcaaatacatgttctatgtctttgtcttcttgcctttcaacttctacaaccaattgattcaatgagttataatagcttctgcctgccgatataggataccagcacataccccgtttcactttgcgaccgatgcccattgcttcagtctgttgcctgaaagtctctttttcgtaatcatattctaattttagtaacaactctttgcgttgtagtttgttaattatattagaaaggggtatatgttggttcataatgatgcttttttctataagaattgcaaagataataataatcctttaggtaggactttatgttttattttgttaaacgtattatagattacacaagaattcaaatattattcctatattgccaaaaataaaatagatttaaaactgtaataattataaatagtaaaaggtatggtatatgacttggacatgttaaaggccttttatgcttctttcgaaaagaagataggtcgggtaagagccgtgttgcagcgtccgctgacattggctgagaaaattctgtatacacatctttatgatgattctcaactgaagaattatgaacgtggcgaggactatgtgaatttccgtcccgaccgcgtggctatgcaagacgcgacggcgcaaatggcattgttgcaatttatcaatgcaggaaaggattccgctgccgtaccttctactgtgcattgtgaccatttgattcaggcatataaaggagcgggcccggatattgcaacggctacggaaaccaaccgtgaggtatacgatttcttacgagatgtttcttcgcgtttcggtatcgggttttggaaaccgggagcaggaatcattcatcaggtggtactcgaaaactatgcttttcccgggggaatgatggtggggacggattctcatacccccaatgccggaggattgggaatggtggcaatcggagtcggtggtgccgatgctgtggatgtaatgaccggtatggaatgggagttaaagatgccgaaactgattggagttcatttgaccggaagcttgaatggatgggcttcgccaaaggatgtgattctgaaattggccggtattctgaccgtgaaaggtggaacgaatgccattatagaatattttggagaagggacagcttcactttcggcaaccggtaaggctactatctgcaatatgggtgcagaggtgggggctaccacatccttgttcccctatgacgaccggatggctgtgtatctgaaagctaccggaagagagtctgtagcagagatggccggaaaagtggcaaatgatttatgtgccgatgctgaggttgttgccaatccttctgctttctacgaccgtgtgattgaaattaatttgtccgagttggaaccttatatcaacgggccgtttacaccggatgccgcaacacctatttcagagtttgccgaaaaggtattggttaatggttatccgcgtaagatggaagtcgggctgataggttcatgtaccaattcatcttatcaggatttaagtcgggctgcttccattgcccgtcaggtagctgaaaaacatttggctgtggctgctcctttgattgtcaatccgggttctgaacagattcgagctaccgccgagcgtgacgggatgattgatgctttccaaaagattggggctactattatggcgaatgcttgcggtccgtgcatcggacagtggaaacgccataccgatgatcctgtccgcaaaaactcgattgtcacttctttcaaccgtaattttgccaaacgtgctgatggtaatccgaatacacatgcatttgtggcttctcctgaattggtattggctctgactattgccggtgatttatgtttcaatccgttgaaagatacgttgataaatcaagaaggcgagaaggtgaaattgagcgttcccgagggagatgaattgccgtcggcaggtttcactcaaggtaatcccggttatttggctcctgccggtgcacaggtagaaattaaggtgaatcccgaatcacagcgtttgcagttattggctccgtttccggcatgggatggaaaggattttacggatatgcctttactgattaaggctcaaggtaaatgtaccacagaccatatttcgatggcaggcccgtggctgcgtttccgtggtcatctggaaaatatttcggataatatgctgatgggggcggtgaatgctttcaatggtgaaacgaacaaggtgtggaaccgattgacaaatacctatgagagtgtatcgggcgcggctaagcagtataaagcgcaaggcatcgggtctatggtagttgcggaggaaaattatggagaaggttccagtcgtgaacatgctgctatggagcctcgttttctgaatgtaaaggttattttggcgaagagttttgcccgcatccatgaaacgaatctgaagaagcagggaatgctggcggtgacttttatagacaaagcggactatgacaagattcaagaacatgatttgattaccgtcagcggattggcggactttgctcccggaagaaatctgactgtgactttacaccatgaagatggcactcaggatcgttttgaagtacagcatacttataatgaacagcagataggttggttccgtgccggctctgctctaaatgcaagataaaagatgaaaaagacagtaccttatattacaggagacggagtgggagtagaaatcactccctccatgcaagccatagtgaatgcagccgtgaaaaaggcatacggcagcgaacacgaaatagaatggatagaagtgctggcaggtgaacgtgctttcaacgaaacaggttcctggttgccggatgagacgatggaggctttcaagaaatatggtgtgggcataaaaggtccgttgactactccggtaggaggtggtatccgttccttgaatgtggctttgcgccagacgctggatctgtatgtgtgtctgcgccccgtacgttggttcagcggagtggtatctccggtgaaagagcctcagaaggtggatatgcatattttccgcgaaaatacggaagatatttatgcaggtatagaatgggaagcaggtacgccggaagctgagaagttttatcgttttttgcatgatgaaatgggagtggctaaagtgcgctttcccgaaagttcttcgtttggcgtgaaaccggtgtccaaagaaggaacggaacgtctggtacgtgcggcatgtaaatatgctttggagcatggcttgccgtcagtgacgttggtgcataaaggaaatatcatgaagtttactgaaggcggcttcaagaaatggggatatgaactggcggaacgtgaattcggagatgccattgcgtcaggcaagttggtgataaaagactgcatagccgatgcattcttgcagaatacgttattgattcccgaagaatattcggtggtggctaccttgaatttgaacggagattacatctcggatcagttggctgccatggtaggcggtatcggaattgctcccggagcgaacatcaattacaataccggtcatgccatttttgaagcaactcacggtacggctcccaatattgccggaaaggatgtggtgaatccttgttcattaatcctctcggctgtcatgatgttggaacattttggctggaataaggcggcggagctgatagtgaatgccttggaatccagttttggcgagggacgtgccacacatgaccttgctcgttttatgcccggaggtgtctcgcttggcacgtcggcatttacaaaagaaataatagaaagaataaactcctaaaaactcacggatatgaagaaagaatatatcatttacaaactctccgaggaaatgaagaatgcgacccggattgagaacgaattgttcaagaagtttgatgtaaagcgcggattgcgtaacgaagatggcaccggtgttttggtagggttgaccaagataggcaatgtagtagggtatgaacgtattcccggcagaggattgaagccgattcccggcaaacttttctatcgtgggtatgatttggaagatttggcacatagtatcattaaggagaaacgttttggttttgaggaggtggcttatctgttattgtccggtcatttgcctgacaaggaagagttggcttctttctgtgagttgattaatgacaatactccgttggaacagaagaccaaaatgaatatcattgagctggagggaaataacattatgaacattctggcccgtagcgtgcttgaaatgtaccgttttgacccgcaggcggatgatacttcgcgtgataacctgatgcgtcagagtattgacttgatatccaagttcccgaccattattgcatacgcttataacatgttgcgccatgccacgtatggtcgttcgttgcatatccgtcatccgcgtgaaaaactgtctatcgcagaaaacttcctgtatatgttaaaaaaggattatacggaacttgatgcgcgcacgcttgatttgctgttggtacttcaggctgaacacggaggtggtaataactctacttttaccgtccgtgtagtttcgtccagccgtacggatacttattcggccatagccgcaggtatcggctcgttgaaaggtccgcttcatggaggggcaaatatccaagtggcggatatgttccatcatttgcaggaaaatatcaaggattggaccaatgtggacgaaattgatacttactttacccgtatgttgaataaggaagcgtatgataagtccggtctgatttatggtatcggccatgcggtctatacgatatccgatcctcgtgctattttgttgaaagaattggctcgtgatttggcaaaagaaaaaggtaaggaagaagaatttgccttcctggaattgttggaggaacgtgccattgctatgttcggaaagattaagaataacggcaagacggtgtccagcaatatcgatttctattcaggtttcgtatatgaaatgattggtctgccacaggaaatatttacacctttgtttgcgatggctcgtatcgtggggtggtgcgcacaccgcaatgaggagctgaattttgaaggaaaacgcattattcgtccggcatacaagaatgtgttggaagaactggaatatgtgcctttgaaacagagataacggtttagaggcacctcggttggcgataagctttggtattattgttttagcttggcggcaatgaggtctgtattgttgtaaagaaaagtgagatatcttcgtggacaaagtaagatatgtttccgagcaaagtaacaccacgtacatgttccacgaagatattttacttttttcagtgagatatggtcgttcataatactctatatagagtaccttgaaaaatccttcaaatctttcagcatgctcgcaaatgccctgcccgtcggcttttcggctgaagaattgggttcgggaatccttcagccgggattggaatccttcagccagaccggtgtctttccagttcttagggaattggtttttctgaaggatattttccggctgaaacatttcacaatgcatatccttcagccggaatgccgacgggcagggcgtttgcggaatggctgaaagatctgaagtaaaaataaggcgtttcggcatgtagataccgttatgggaaaaaacaacaggtcaaattttaaaaagctcttgttctttcaatgaaaacgtcttgttcttttctgaaaagaacaaagcctttaaaaaaaagaacaagacgtttgaaaggttagtaacgtgtatgccggaaggttaataacgtgtgggatgatacgttactattgaatattttacaattataattcattatattgcatactatacatatcaaaaccgtcagcccaataattgcgtttgatttcattcagtgtgaatccttgcttttcatagaatttatatgctaattgcgaggttcggactgttatttttttgatactgggaatagcctttaaaacctcaattctgtatcttaaaagctttttacctaaagatttgccttgatagtcgggatgcataatatcccaacttatttttccaatggttcttttttctgcgaaatttatcccgccgcatccaaccactttcccgtcaacgagcaagacataatagagctctattcctttatccaaataattgctcaaatcattaacctcctcttttgcaaagaagttgggtgtgtttaatttaattaaattcattacaacttctttatctgtcgtcaaatattctctaattacaattgaattatcttgtgtcatagaactttcgtttgaaatttattggtaaagatagtgataaaaacgagagttagagcggataggttcaagaaggttgaaaataaaggttttagcgagaatttgactgcaaagatgaacccaagcgaaacccttctcaaagccaattgaaaccggagttgcgttaccatcccgttactctgttccgaatggtaaaggcggttttgggaggatttcaaaacgctgaattacaggcacgattcgggaatattcgactgtaaaaacggtcggattttcggattttgggcttgctgccgtgaaaaaagtctgttttccgcctcgattgcactgattcgctgcggtctgcatttcgtcgaacagctctacaagtaataattttgtttcattaaaaatcgtagagttatgagatcgacattcaaagttttgttttatctgaaatgcaatgccccgaaaaaggacgggcttattcccgtcatgtgccgtatcacgataaacggcaaaatagcccagttcagttgcaagctggacgtggaggagaagtcgtggaacgtggagttaggccgtgtctccggccgcagcatcgctgcacaggagaccaaccgtatgctggataaaatccgtgtaggtatcaaccaagcctaccagaagatcgccgaccgggataattatgttaccgccgagaaagtgcgcaacgcctatctcggtttggggatgaaccatgaaacactactggcggtattccgtcagcacaacgaggattacgggaagcaggtgggcaagctcaaaagcccgcgcagctattggaaatactgcaccatgtacaaacacctctcggagttcgtcgaaaagcggtataaggtcagcgacatcgcgttcaaagagcttactccggcatttatcacggacttcgagttgttcctgcgggtagaaaagaatcactgcaacaacacggtctggtcttatatgatgccgttccggaaaataatctatatggccgtcaataacggtttgttgcagcgcgacccgttcttcgcgtacagcatcacgaaggaggagaccaaacggggttttctgacccaagaggaaatcacactcctgatcaacggcacattcaaaaagaaaagctacgagctgatccgcgatctgttcatcttctgcacctttacgggtttgagctggacggatatggcgaacctgacgaaagccaacctgcgcacctcgttcgacgggcatctgtggatcgacacgaactgccagaaaacaggcgtcgaaacgaatatccggttgttggacgttgccagacacatcatcgagaaatacgacggcatggccgaaagggacaaactgctgccagttccctgttacgccaactgcaagaacggcatcaaagcaatagcgaagaagtgcggtatcgaaaagaacgtcacgtggcatcaaagcaggcatattgaattgcctttgtcgctgaatttgaatagattgcaaagattagtttcttgataggtaacgatttggaaacgagtgaagttctgtattttacctcgtcttgcattaaatcaaaagaacgcctttttgcaatgcaaagatagtgattagaattgatttacaataaacttcatcctgcaaaatcgcagattcctgtgcatttttattgttcaaatactgctaacttcactaaaaatgagtaactttgcaaactaacaagtattggttttgccatggttataagaacgataaaattgacatcactatttgtcaatacggaaaattatagatttgagcctttatcatcacaaaaagaagcaatagataagatgatagaggatcaaggggataaattatattctcttgtggacgatattgtaaccaatggtcttagccccgtcgatttgattattgtaacacccaacgaagacagcaataagtatgttgtacttgaaggaaataggcgaataacgtcattaaaactattaaataatccgacactaatagatgacaaatactctcctttaaggaagaaatttcagaaattacaaaaagaaaaacctaatgctatttctgaattgaagaatattgcttgtgctgtttttgaaacccctactgaagctgatatatggataaaacgtaaacactctggagaacttaatggtatcggaactgtcacttggaacgctcaacaaaagcaaagattcgaggagaagacagaaggaaaatcatcaattccattgcaaattatcactttgctgaaatcacaagaagaggtttctgatacgattaaggattcattatctaaattaaacattaccaacttgcaacgtttgatgtcggatccatatgttagagaacaccttggcttggaaattaacaatggaattttagtttcaaaggttaaagtgtccgaagtcattaaggggcttttaaaagttgttacagacattctgaatccggaattcaaagtttctgatatctataacagagaaaaaagaaagcaatatattgataattttgacaagagtcaaaagccagatttgtctaatgaagcatctgaacaatggagtgttcaagatattgaaaacaataaagaacaagcatcaagaaatagcgagaaacaagaaataaaaggggataaaaacaggaaaacaagaaacagaggagctttagtgcccaagtctttgaatttacatatcagtaacccgaaaattaataaaattttcgaggagctaaaacatgttcaggtcaagacatgccccaatgcatcttcagtccttttaagagtatttttagaactatctgttgatgcctatttggagaaatttgatttagtaagaaacaatgctattacagcttgttcttctggtgaaagtttgcaagggaaagttggtaaagtcttaaatcatatgacccaattaggaacaatgagtaatgacttatcaaagggcataaggtctgaaataaatgataaaaattcagttctttcaatcgaatcattgaatgcatatgttcataacgagtttttctaccctaaagcagataatttgattactggatgggacaacatagaaagtttttttatccaattgtgggaatcaataaaaaataaagaataatattatggaatttctatcacctttaagataccctggcggtaaggctaaagttgctgatttcgtacaatgcttaatcaaagaaaacgcattgctcgatggcacttatgttgaaccatatgttggaggtggttccgttgcattatctttgctctttaatgaatatgtcagcgacatacatataaatgataaggatatatctatttatgccttttggtatagtgccttaaataacgtggatgctctctgcaagatgataaaggatactcctttaaatgttgaaacttggtttaaacaaaaagaaattcaatccaataaagagaattctgacttgttagaattaggcttttctacattcttcttgaataggactaatcgctcaggaatcttgaaagcaggagtcattggcggttatgaccaaactggaaattataagattgatgcaagattcaacaaagaagatttgataaaaaggattcaacgtatagcagattatgcagatagaatccatttaacaaatgaagatgctgtttctttagtacaacggttaaaaaatgaattaccgtataatacgttattttatttagacccaccatactatgtaaaaggtaaaggactttatctgaattactataatgatacagatcatcaaaatatagctaacactataagtgagattgcaaattgtaagtggattgtctcttatgataatgtaccattcataaccagcctatattcaaaatatagacagcaatgttttgaattgaattatagtgcgagtaattccgggaaaggtaaagagataatggtattttgcgatggcatagttatccccaaacacaaactatttaaccattctacaaagtgaaaataacgcacattcatatcgaaagatttcgaggatttcaaaatgaagattttgaagtaggctctttgttaacagcaattgcagggcaaaacggaactcaaaagtcaacattacttggtattataacacaaactttcactcttaagacagaagattctatgagagttgaaaagcccttgtgtggtggtagttatatttccgcattcaaagataagtttaggttatcacctacttttgataaaccaaaaggtcatgaatggactatttcctttgatgcaggaatggatgattttactgttgaaagtatcaaacgaacaggagatcctaatgtccgtttttggaaaaaaggagctaggcaagaaggagatggatacatttccttccccacaatctttttaagtctaaagcgattagttccagtggcagaggaagctaaaatcattacagatgatacattattaacgcaagaagaactaaatgagtttaagcaattgcataataaaattctaatagcacaaactcccatttcttccgcaacaacaatcacatcaaaaaacaagcaatctataggtgtatctacagaactatacgattggaatcaaaactctatggggcaagataatttaggtaaaattatcttggcgttattttcttttaaaagattacatgacaaatatccccgacaatacaaaggcggtattttggccattgatgagatggatgcaacaatgtatcccgcatcccaagtagagttgttaaaggttttgcgcaaatatgcatctaagttgaatttgcaaattttatttacaactcattcaatgtctcttcttaaggcaatggatgatttagttcaagaagtaactaaaaaagaagaaacagccaatcaagcaaagatcctttaccttaagaaggttgatgataagattgcaattaaacagggcgtgaacttcaaaggcattcaattggatttaaatgttgttgcagaaggaaataatcgcaagaaaaatagaattacagcatatacggaagacaaggaaaatatcttatttgtaaaagctattttaaagagcaaggcttttgtgttggattttgtggatgtaacattaccatgttcaacattaatggaacttgtaaccaaaagagtgcctgcttttatatatccatattctattgttatattagatggggatgttagaatgaataaaaatgatctcaggaaaatcaacaatgcagataacattttgattttaccgggaaataagtctccagaaagactattggcctcttatttgtataatctatctgatgtagacccattatggtctaagattgcagatgggtacacaaaacaattctgtttccgagagtattccatggaacaaataaatgcaggaggtgaactggggcgccaaaatgcaaaaaaatggtttaatagccaattagaatattgggggcgaaacggttgtaaagtccttaatccttttttaagttcaatttctgaggaggcacaagagtttagaacaaattttgacaatatgattaaacagtatatccatgactaaactttcggtgtccacaatgaagtgtggacaccgaaagtttagtcatgaaattgcttgatataaaatctaggtacattttatgtatcttatcctaactcttttttctgtgtctaagtctgggtacaataaaaaagcatgtccagtttgctaatggcgttacgagcttcctgtatatgtctgatgctgaaatgcaacgtgatggtactttgatgattggcgggggagggaagtcggaaatcaatggaaaacctgtagaaaatagtatatacctctctaagtaaagtcttctctgcgataaaaatcgtatcctttttttgcaaaaaatctcttaattgttgctttcctctgatttttcccttaaatttgttagtgacttactaaatttaatacagggaggaacgagtatgggacaacagacttttgaatttttgctattggcaatgtccgcacttgcggtgattgtatttgtagccctctattatgtacgtgccggttatggtatgttccacaccccgaaatggggactttcagtgaacaataaattaggttgggtactgatggaagcgcctgtattccttgtaatgctttatctgtggtggaacagcagcgtgcgttttgatgccgctcctttcctcttttttcttctttttgaattacattatttccagcgctcttttatcttccctttcctgatgaaaggaaagagccggatgccccttgccattatgttgatgggagtggtctttaatgtcctgaacggactgatgcagggcgaatggttgttctatctggctccggaaggactctatacagatgcctggctcagtactccttctttttggcttggggttattctgttctttatagggatgggcattaatctacattccgacagtgtgatccgccatttacgtaaaccgggcgatacacgccattatttgccgcagaagggaatgtaccgatatgtcacttcgggcaactattttggcgagttggtggaatggatagggtttgccgtactcacttgttcgcccgctgcatgggtgtttgtgctgtggacgtttgctaatctggctccacgtgccaattccatccgtaaccgttatcgggaagagtttggtaaggatgcggtaggaaaaaagaaaagaatgattccttttatttattgaatttgaatagtatatcgtttctgtttcaggaaatgatgaaagcgaaacataacatatgaatgatgaactctaaattatttactcccgcttctatcggaccgctgactttgcgtaaccgtacgattcgttcggctgcttttgagagtatgtgtccgggcaatgctccgtcccggcaattgaaggattatcactgctcggtggcggcaggtggagtgggaatgactactattgcttatgcagcagttacacagagtggcctttctttcgacaggcaattgtggatgcgccctgaaattataccgggattaagggaaataaccgatgcggttcataaagaaggggctgccgtaagcattcagttgggacattgtggaaatatgtcgcacaaaagtatttgtggggtaacacccataggagcttcttccggttttaatctttattcgcctactttcgtgcgtggcttgcgcaaggaggaactgccgcagatggcaaaggcatacggtcagtcggtcaactgggcgcgtgaggccggatttgacgcggtggagatacatgcggggcatggctatcttatcagtcagtttctttcaccttacaccaatcatcgtaaagacgagttcggcggctcgttggagaatcgtatgcgctttatggatatggtgatggaggaagtgatgcgtgccgcaggtaatgacatggccgttctggtaaaaaccaatatgcgtgacggttttaaaggaggaatggaaatagatgaagctgtgcaggtagcgaaacggttggtacaggacggggctcatgcgttggtgctgagtggaggttttgtaagcaaagcgcctatgtatgtcatgcggggagcgatgcctataaaaagtatgacacattatatgaactgttggtggctgaaatatggggtgcgtatggtaggcaaatggatgattccgacagtacctttcaaagaggcttattttttggaagatgcattgagattcagaacagaaataaaggaaattccgttagtatatgtgggggggctggtatctcgtgaaaagatagatgaggtattggatgatggttttgaatttgtacagatgggaagggcgttgctgaatgaacctggttttgtgaatcggttgcgcactgaagaaaaggcgcgttgcaattgcggtcatagtaattattgcattgcgagaatgtacactattgatatggcatgccacaaacatttggaagagaaattgcccctttgcttggaacgtgaaatagaaaaattagagaaccaatgagtaaattagccataataaccggtgccgatggaggaatgggaaccgaaataacccgtgcggtagcacaggccggttatcatgtaattatgttgtgctacactcttttcaaaggagaggagcgtaagaaccagttgattttggaaacaggcaataaagagatagaagtcagacaggttgacctttcttctatggcttctgtgactaatatcgcagaagatttgttggggcgtggaaaacatatcgacttactgatgaacaatgcgggaaccatgagttccggaggtttgattacaacggaggatggtttggaatatacggtagccgtgaactatgtggccccttttttactgaccttgaaattattacctctgatggggcagggaacccggattgtgaacatggtttcttgtacgtattccatagggaagattactcctgaattttttgttcgtggaaagagaggaagtttttggcgtatccctgtttacagcaatacaaagttggctttgtggctttttacccgtgaactttctgaaaggctgaaagcagagggaatcaccgtcaatgctgccgatcccggtattgtttctaccaatatcatccgtatggatatgtggtttgatccgttgaccgacatactgttccgtccttgtatccgtactccgaagcaaggagctgcgacagctgtcagtttgcttttggatgagcgatggaaagaagttacaggacagatgtttgcttcttgcaagcctaaaaaagtaaaggataagtttatgaatcatccgcaggcaagacagctttgggcggatacgaaagcatatttggagaaactgaaattggaggagccaattggctgagaattcctttaaatacataaaagccgtatcgttactcaaaagtagagtggatacggcttttatggtcggtgaagagtgtctggtttcggattgcagtgtagttgaggttattctttcttggctgcttgttctgccagcatctgttcacggcttttactttgggttacaatataaactcccgtgaataccagtgccacagctattcctttggcaacaccgaaggttcccattcctaacaagatagagacactggttcctacaataggctgcacatagttgtacatactgatgacagtagggcgcaatgttttctgtccgatcatcatcagaatataggcaaggaatgttccacctacaatgacataggctacacaggtccatgtggaagtggaaatttcgtgaaaatgtatggtcgagacctcatgataggaaaatggaataaagcagatggctgcataggtgaacatccatttcattaaagtaaatatgttgtatctgctgatcagtcctttgaaaatagccagatagaatgagaaactgatttgtgccaacaggcaaagcaaatctcccggaatacttccgccttttccatctgttgagccttggctgctcagtatgagtgttaaagctccgatggaacctagaaaaatgccaattacttttttccctgtaaccggttctttcagataaatggcagcgacaatcatagtggcgataggggctgtggttgttacaatggaagcatcgatgggggaagtcagtgatagtccgaaagtaaaacatccctgattcaggacgatacccaacaatcctgcaaagaacaacatcatcaagtcgtgcggctttacttgttctttaggagcgaaaatagaagctatccaaaaacagatagcacctcctgtcattcgaaatgtagcgagggaaaggcctgaaataccgttttctaacgccgttttaccaattggggacattaatccccacattatggcagcgcctagcaatgccaaatgtcctttgtacttttgaatagccattctttttaccttaaataacagtgcaaatgtaggaggttttttttatattttctatctttgcttacaagtaaatctatcaaaaatgaaaaagcaagctgattatataaaacgtatcgagataaagcggctttggggccgtaaagatatctcatgggaactgcgtccggatgtcaatattctgagcggagtgaatggtatcggcaagagcactatcctgaacagatctgtgaatagcctgacggctttggaaggtggagcgttgagtaacggttcggctcccggtgtacattttgtcttctctccggaagatgctacccagatacactttgatgtaatccgtagttttgaccgtccgttgattcattcggaacttctcgaaaagatggcggataagaatgttaagacagaattggattggcaactttatcagttgcaacggcgttatctggattatcaggtaaatatcggtaaccgcatcatcgagtgccttacctccggtggccctgacggtcagcttcgtgccgccgagatgtcttaccccaagacaaaattccagaatctgatggatgacttgtttggtgagaccggtaagaaaatcattcgtaaaagcaatgagattttgtttgaacaggatggagatatactttatccttatcaactgtcttccggcgagaagcagattttggttattttgctgacggttctggtgcaagacaatcgccgcggggttttgtttatggatgagcctgaagtatccttgcatgtggaatggcaacaacgccttatttcattgatacggcaattgaatcctaatgtacagattgtattgacaactcattcgcctgctgtgattatggatggctggctggatgcagtgaccgaggtgagtgatattacaaaataaacaatttctaacgacgatactatgggaaaaagattgtccgagaatctgtcctccttatatattggtgcggccaacaaattgaagcctaaatgttcgcgacgcaagattattgcatacgttgagagttatgatgatatttcattctggcgtaccttgttaggtgaatacgaaaatgaaactcgttatttcgaagtgatgcttccttcgaaaaccactttggctaaaggtaagaagtctgtgctgatgaatgaactgggacctcggttgggacaaaatatgatagcttgtgtagatagtgattatgattatctgttgcagggggctacccatacctcacgttatataataaataacaaatatgtttttcatacctatgcatatgctatagaaaactatcagtgttatgctgaagcattgcatgaggtttgtgtcatggcaacgttgaatgatcatccattggtggattttgtcgcttttatgcgtatgtattctcaaatagcttatccgttgttcatctggtcggtgtggttttatagaaaacataatctttccgaattctctttgcttgatttctgttcgtatgtaaaattagatagggtcagtgtctatcatcttgaacggagtttagagagtatgagccgcagggtgaggcgtaaattattggagctggaacgccgccatccgaaagccttggaggaaatagaggcgatgaagggggaatttgccaaattgggagtgaatgaggacaatacctatatgtttattcaaggacatcacattatggatagtgtagtgatgagattgttagtacctgtctgcaatgtgttacgccgtgaacgtgaaacggagattaaagaactggcagagcataatatgcagtttcataatgaactgaccagctatcagcgccggcagttgggagtagacattgtactccgcaaacataccagctataagttatcacctctttataaaaaattggaagcagatatagaacgtttcttgaaacatatctgaatcggttatttcttatgggaggcaagtgctttggctatgaaatgatctagtgagaatttacccggtcctgctatatacaataatatgaatactaccagataaataaaggctaattctttaacggcgaaaggatcagaaccatgaacaacaaagaatgcgatacacatggtgaagatcatcggaagcattgccaagcgataaaggaatccgaaaatgaaagccatcgaacaaaccatttcaccaaaaatagccagtaccagtgaaagttggctgcctattcctaaaggatcgggaaaactgccggacatgacatcgtagttggcccatttctgtacaccgtgcgacatgagtaaaataccaaacaggattcgtaaagctaatatcagaagtgacatagcagtgccatcgggcttggatggaaataagaatttataaatgactgacataatacgtttttatttttttgtttatactatatttatataaacgtaacaaaagggtgaaatgttcaaatcattcactgtttgtttctttggagatggttgattcgctcatattaattttttattgtagaaaaactcttgaaacgaatgtcaggacttcgtgcaaaaggaataaaaaaagaacaattataataaatattagttctatatggtataatgtttgtcgtaccttaggtaacgataaaagctaacatacgaatatatgaaaacaattaaatgtattggagtgctgacatccggaggggatgcttctggcatgaatgccgctatccgtgcggtaacccggagtgcaatttgtaacggatttaaagtgaagggtatttatagaggatatgaagggctgattaatggagaagtgaaggaactgaccacccaggatgtgagcagtgttattcaacgtggaggaacgatgttgaagacagcccgttctgctgaattccaaacagtagaaggacgcaagaaagcatacgatactatgcagcgagaaggaattgatgctttggtgattataggtggaaatggttctattacaggagcccggatttttgcggaagaatatgatgtgccttgtatcgggttacctggtacaatagataatgatctttatggtactgactttaccataggttacgatacggctttaaatacgattgtggaatgtgtggataaaatccgtgatacggcaacctctcacgaccgtatattctttgtggaagtgatgggacgtgatgccggttttctggctcaaaacagtgccattgcttctggtgctgaggcagcgattattcctgaagatcgtacggatgtggatcaattggagaaatttatcgggcgcggttttcgtaagacaaagaatagcagtattgttattgtttccgagagtccgaaagacggaggtgccatgcattatgcagagcgtgtcaagaaagaatatcctcaatatgatgtgcgtgttaccattttagggcatttgcaacgtggaggttcgcctagtgcttatgaccgtattcttgccagccgtctgggggcgggagctattgatgccatattggaagggcagcgcaacgtgatgattggcattcataacgatgaggtggtatatgtacctttttctgaggcaattaaaaaagacaagccccttgataaatcgcttatcaaggtgcttgatgaattatctatttaatgaaaataatcatgaaaggagaagcggaagtaattcttctgctttttctatgatatgtgccggatgtaaggcttccaattctgtgcgcggccggaatccccatgccacacctatagctgttactccggcatgatgcgctgtttgcatatctacattagaatcacctacataaagtatatcttcctgtttgactcctgcttttgtcatgatttcgtttatgatggatggatcgggttttgcggggataccttcgcgttgtcccagtacttccacaaagtttatttctggaaaatagtgtgctattaactttcgggtagctgcttggtatttattggaggcgaccgctatcatgatcccttgctgttgcagtgtttttaataattcggagataccgggataagggcggcttaaatcggcattgtgctcatcataataagggatgaattgtgaacgtatctttaatacattctcttccgtacgttccccttcaggcagagcacgctcaaataatttattgattccgtttcctacaaaaaagcggtatgcttccgtttcatgtgtaggatagccataatattgtaaggcttggttggtggcggcagccaggtcggcaatggtgttcagtaatgtgccgtccaggtcgaatattacaagtttcttcatatttgtacttcttttatcggtgcaaagttactatttttgtatgcaaactaataataatgcttatgaactttctagaattagtgaaggcgcgctattctgcacgcaaatatgccaatcgtcctgttgaggctgaaaagttggattatatcatggaatgtgtacgttttgcaccatctgcagttaattttcaaccatggcgtttccgtattgttacagatgaggccgtactgaaagcgttgtattcatgttataaacgggaatggcttgctacggctccttgtatcatagtggcttgtgtggatcataatgagtcttggcatcgccgtgccgataataaggatcatgctgatattgatattgctattgcagtagaacatctttgtctggctgctgccgaacaaggactgggtacttgttgggtttgtaattttgatgctccgcaatgcagtgaggttttgggactgccggaaaatttggaaccggccgttttgattccggtcggttatgcggaggatgaacctacagaaaagaagcggaaaccattaaatgaaatccttctttaaaaaatcacaaaaccacctttcggagtgtcatcgggcaggtagattcaatttccttttacagtggatgaaggtactgttaatttcttgacctgatgactgttccggattttaagcacatttctttagactcttcttattttctgataattttgcatattttgtattccatttatgatagaagtaaagccgaaatggctaaatttgagcactttttaggctttgaataacctatgagtgtagtaagtactattaataacactgaaaattatggagaacataggagttggattgatgttgatggtggtcggtatggcgaccgtctttgtcattctcctcatcgttatctatctaagcaagtaccttattactgttgtcaacaaagtggcccccgaagagacccccaaaaaagcacctgctgtagcacctacggcagatactggtgctatggatgctattaaggcggcagttgagattttgacagcaggtaaaggtcaggtgataaagattgagaagttataatccaaaaaaagaaaaacacatttatcaaaaatggaaagagaagtaaaatttagtctggtcttccgcgatatgtggcagagtgcgggtaagtacgtgcctcgtgtagaccagttggttaaggttgccccggctattattgaaatgggctgtttcgcccgtgtggaaacaaatggtggtggttttgaacaggtaaatttattgtttggtgaaaatccgaatagagctgtgcgcgagtggacgaaacccttccacgaagcaggcatccagactcatatgctggaccgtgcgctgaacggtctccgcatgagtcccgtcccggcagatgtccgtaaattattctataaggttaaacatgcgcaaggaacagatattacccgtactttctgcggattgaatgatgtccgcaatattatcccttctatcggctatgctcacgaagccggaatgatttcacaatgttcgctctgtatcactttttctccgatacatactgtggaatattatgtgaatatggccaggcagcttatagaagccggagccgatgaaatctgtattaaagatatggccggcatcggacgtcccgtttcattgggaaagattgttgccggaatcaagaagattaaaaatattcctatacagtatcactctcatgcggggcccggattcaatatggcttctattttggaagtatgccaggctggttgcgactatattgatgtaggtatggaaccattgtcatggggaaccggccatgctgatttgattagtgtgcaagccatgttgaaagatgccggatttaaagtgcccgaaattaatatggaagcgtatatgaaagtgcgttccatgattcaggagtttatggatgatttccttggtttatatatcagtcccaaaaaccgtctgatgaattctttactgattgctccgggattgccgggcggcatgatgggaagtttgatggccgatcttgaaacgaatctggaatctatcaacaagtacaaggcaaaacgtaacctgccgtttatgactcaggatgaattgttgatcaagctgttcaatgaagttgcttacgtatggccgcgtgtgggttatcctcctttggttactccgttcagccagtatgtgaagaaccttgccatgatgaatgtaatggctatggagaaaggtaaggaacgttggggaatgattgccgatgatatttgggatatgattttgggtaaagcgggacgtttaccgggtaaactggcccctgaaattattgaaaaggcagaacgtgaaggccgcaagttctttgatggcaatccgcaggacaattatcccgaccagttggaaaaatatcgcaagatgatgcttgaaaaacaatgggataaaggacaggatgacgaagaactgtttgagtatgccatgcatccggcccagtatgaagcttataagagcgggaaggcaaaagaagacttcttggcagatgtgaagaaacgtcgtgaggagaaagcgaatgccactactcctgtcgaagctgaaaacaagaccaaggtattgacggtggatgtgaacgggcaaccttatcgcgttacagtggcatatggtgctgtagatcctgctacgctgacagctccttcgggtgcagttcctgcacaagctgctcctgctccagtaggggaagggaaagatgtgctttctccgttggaaggtaaattcttcttggtaaagaatgcccaggaaactccgaagaaggtgggtgaaaaggttaataaaggtgatgtgatttgttacgtcgaagcaatgaagacctataatgcgatccgtgcggaatatgacggtactataactgctatttgcgctaattcgggtgacacggtttcagaggatgacgtattaatgaaaatagtataatggaagatatatttgaaagactttatgatatgactgctttcagcaatattattgctgaaccgcaattcttgataatgtatgccattgcgttcatcttactttacttggggatcaagaaaaagtacgaaccgctgctgctgattccgatagctttcggagtgttgctggctaactttcccggtggtgagatgggggttgtccaggccgatgagaacggcatggtaatggtgaatggagcactgaagaacatctgggaaatgccgttgcacgaaattgcgcacgacttgggcctgatgaactttatctactacatgttgattaagaccggttttcttccgcctatcatttttatgggggtaggtgctttgacagactttggtccgatgttgcgtaatttgcggctttctattttcggagctgctgcacagttgggtattttcacagtattgttggtagctatcttgatggggttcactccgaaagaggcggcttcattgggtattattggtggagcagacggtcctaccgctatctttaccactattaaactggctccccatttgctagggccgattgctattgccgcttattcgtatatggctctggtacccgttatcattccgttggttgtgaaaatctggtgtacgaagaaagaattgagtatcaatatgaaggaacaggaaaagaaatatccttcttcggtagaaatcaagaatcttcgtgtgctgaagattgtatttccgattgtagtgactacggtggtcgctctgtttgtgccaagtgcagtgcctttgattggtatgttgatgtttggtaacttgattaaggaaataggtagtgatacttcacgtttgtttgatgcagcttcaaatagtatcatgaatgcggcaactatcttcttggggttgtcagtcggtgcgacaatgactacggaggcatttttgaattggactactatcggtattgtgataggtggtttcttggcgtttgccttgtctatttccggtggtatcttgtttgtgaagttggtgaatcttttcactaagaagaagatcaatccactgattggggctacaggtttgagtgctgtgcccatggccagccgtgtggctaatgaaattgctttgaagtatgaccccaaaaatcatgtgcttcaatattgtatggcaagtaacatttcaggagttatcggttctgccgtggctgccggtgtgctgatttcattcctacaataaaaatcatcgtatttaaattgttcgggcacgaattatacggaaattacaggtgttttagacaatactgtaagatctgtatagttcgtgtcttttattctctttctgtatcgttctcctggctaaaacaatagaataggccctctcctcacgaagaaagcctatcgttagattaatgtttaatataagagagagttttatagtcctaacagttcattgaacttctctgctgtcttgggatctgacggacgggtcatattggcagagatgattttgccatcccgatccagcaggataaaacggggaatgccgttgatgaggtaagcatccataaaggtcctgtctgttcccatgtgtaactggatccctttcagttgatcctttgttaccatgttctcccatgcctttttgttcttgtcgcatgacaggctgacaaaatgaatatcctttcctgcatatttctcttccaattcctttaacgcaggaagttctccacggcaagggccacaccaggtagcccacacgtcaatatagatatatttccctttcaaatctgccaaagatactgttttcccatttatatccggataggagaagctagctgctgagggattgcctgatcttaatttttcccacttggtacaaagtgcgttgaatttttctatggactttgcatccttcacatgtttgcggaataggacaatcagcccgtctgcttcatccagcccgttattgtctacaaagttataaacaaattggtcaatcagaaattctgcaaccttttcatcttgtatggttgcatctacgtagtttacactttgttctgtagaattggatgcaactgtttttcctttattactaaaggcgctgatagcatcgggaagaaaagccttatattcttttagagctaataaaccggcattgatcggagtaatagcttccagtttttcataatatgctttggaaggaatatagttgtcatcctttccaaaatgaggatgatacaaagcgtatttggagaaataataatacgtatagaattgcaaacgtattttttcctgtgcagtgaaatcggctggaagttttgcggcttccaatacttggcaattggctgcgtacaggctgtctcctttgtgtatgagggcggcctcttgcattttcatatcgggcataccgagtgattggagctctttgcttcccagataggtgttgatagcggcacctgctccttcaaaggttgtgtttctccacatgttgtcactgtcgaatgacaaggtaaggtcttgattgggatccagataaagagtacggcgtccgcgtgtgtattgcatggttacatattgcggagtgaatcctgtgatttctatgttgccgtttccagcggcatcaatcgccacttctttttgttcgccactttggctgaaagtcaatctcactttgaccttctcattgggattggtgaccttaaaagtgagctttgcagcttctgtagcggtaaaggtactcagcgcaaggccaagtaccatgatggattttagagttctcatcttatttttttcttttaggtttcattttcaatgcatcgggacgcatgttatagactttttttccgtatgcgggttctgtgctgaggcaggcagggatgggggctttgccgttcagtttgcgaagcaccatttccaaggcggctgcatattcctgatggatgaaagcatcatctctgtctgtttggttataagcaatgtattgcagatagcctacacatttgttgaaccagaattcgggaagttcctctgctttgtatcccaaacgggcgataaatttcagtctactgattaactcttgctgattgactgtggtgtctgcaatcatcgcatcaatctgggtagctgccgcttcatacttttgttcccggatatcattattgatacggatcattttcagattgaaatcttttccttcatagttgcataaggcttcaatttccgccaattcgccgtatgaagtttcttttgccaatttagcatcaacagcttttttgccgaaacgctggcagaaatctgcataattgtctgatacttgcttcaggtacgggttcatgccattgatagtgtttacatatacttcccatacatccggatcagtcagtttggcacctccttttattaattcatcaaaagcggcttgtacgttattgcgtgcatagactgaatagtgataattgatgtaatcaatcaggaatgcacgttctctgttccccttggtatattgctcttgcaggtaaaaagagcgtttggtaggaatgtttgcatcttttcctgtctgaataaactgttcgggagtctgacggctgctgctgcgatgaacaatttcttcggtagcaggatcgacgaaggcataagtagggtagctgcgtacaccgtatttcttggctaatgtaattccttcaccttcttcagcatcaattttgaggttgatgaaagtttggttatagtagtaacccactgtaggcaatgagaatacagtttgtgccatattcatgcaaggtccacaccattgggtatagaaatcaatgaatatcaatttgttttctgctttggctttagctacggcttctgcccaagtagtgccgtgcaggaaattgattcctgcattctgggcatttaagtgaatcgcatagatacatgcgaaaatgagtaagatatattttttcatgtctttgaatttaatatgttaataaccagggttttgtttacattccagattagaactgatttctgatgacggaatggcatcgatacggcggtctatgatgcgttggtaataattgtctccttgtgcttccgatttttcatattctttttccaaagcttctcttaacgtcttgttcaaagcaagcagacgggtgaaatcgggtttctctgtgtatcctgcaaaacggatcatggcaaaccattcatgccagttctcgaaagacaattccagcatccattcgttgaatatggcggtttccagttcttcgttattggctggaagaattatttcggctcctgctctttcgcgtagtttacggatcggtgcgtaggcttcggatatagaggctcctgaacgatacaaggcttcggctttaatcaggtagagttcggaaacacgactgaagatgacaggcatgtcattggcatcattcagcagcttctttaccgatttcaggttgtaggctaccgcagaactgcggctgtccatcaggctgtctactttagagaagatggcatcggcgcgaggatcatcccccaccagttccacatactcattggtgggcccccagtaaccttgttttttcgtggggctgttaccgtaacattgctgacgggttgaagtgttggtggcatctttttggtcgaatacacgagcgaatagaatctctttggttgttgaaaacttatcaaaaacgtcaccatagtttgcttccggcaatggagaatttgtatcaattgcatcattaactgctgctaccgcttctgtgtattttcctgcatacagcaatactcttgcctttaatgccttggctgcttctttagaagcttgtgaaagctttttccaatcaggagctttttcaatagctatttccagttgatccagaatatattgataagaatcggctacggagctacgcacctttaaagcattggatacggatggagcttcattacgcatgacaactccgtattcactattcatatcccaaaattcgcagtaacgaaccaggatattgaagtaggccaaagcgcgtaaataggctatttcacctaacacttcggctctacggtttccggagaactctccgtcactcatgcggttacaggctgtttccaggaagttggcgtttttgattacagcgtaatctgcatcccattccgttgcatcactgaatgatagggtaggcaacattcgttcggagtagtaaacggcattaccggcgctgacaatttcttgacgccacatggtcccggctttgaaggaaccacttactgtaggaaatatgacattgaatccatttccaggcaaggagtaatagattccgtttaaggctaactctacagcagcgggtgttgtgatggcaccgtctaaatctgcttcgaattcgggcttttggtccaagacatctaccaactggcacgaggaaacgcccattgtaagtaaagctaagaatatatattttttcattcgattatacatttaaatgattataagttaatttttaaaccagccgagaaagagcggaaacccggataagtggaggtttcatagttaccgccatagttgctgttactgtttacggtagcagggtctgttcccggataagaggtgagcgtgaacaaattggtagccgagacaaatagttgtcctttaattactttgtttaaaggtaaattataagtcagacgcacttcctgcaaacggaagaaggaggcattaaacaattcatgatcggttagtctaggtacaccgtcacctatatacaaggccgggtatttggcatctttgttggtgtcagaccatctgtcattcaatccatagtcaatcaaaccggttaattgtccgggtagattctgcaatgttttgttataaatcttcaaaccaccgatctgatatccgaagttggcgaacaggctgaattgtttataagataaattggcagtcagaccgccgaacagatccggatccggattaccgataataacacggtcattgtagttgatgattccatctccatttaaatccttaatttccaaatgtcccggttttaatgagttaccatcgtaataactttgtccctttgatttagcataggcattcaattcatctattctggcttgatcttgtatgatcccggcatattcataaccatggaaagctcccattggatagcctacagccaatacttggtcggcatagctgccttgaactactacattcatagctgattgtgctctaccttcttcaaccagtttggtgactttattcttgttatgtgacatattcaaggtcaggtccaagttccagtctttagtagataatacacggcctaccaggtttatttcaataccgcggttggtcaatgctccgatattacggttcatctgcatagagccaccggttgcactgggcgggaaatcaaatgaccagatcaagtctttggtatctttgatatagccggagatagaaccggtcagtcggtaatcgaacaatgcgaaatcaagacctaaatcatattgggtcgatttttcccaacggatgtcgcggttacccacttgtttatgtataatggctgacaggttattataactggttgcttcgtataaatcacgattagagaagctggttaagttttgggtaccggtagtacctacgctggcacgtaatttcaaatcattaatgaatgtcaggtttttcatgaatttttcctgagagatacgccatgcaatggctcctgaagggaagaaaccataacggttgttcgaaccaaacatggatgaaccatcataacgccctgtaaaagtgaacaggtagcgctccattaatttataattgatacgggcaaatgaagagaacagaccacttgcattatatccgttaccccaagatgagatgcttgcggcacttcctaaattggtgtaaatatcattatccggataagtctggctattcattcttgtactacggcttataccacgttcaaaggagataccggctacggcatccaaaacatgattcttgttgaactcatagttataattcaatgtattgtcgaatacggtttttgaatatttataatgatattctgacccactggcttcatttctagtacttagaaaacttggactgaatgaattgttttcagtaaattgtaaattacccgataaactggaacgaaaccggaatcctttccaaatatcaacttctccgtatacggttcccatgatgcggtaaatattatcatgatttttcttataggtgttggctaccgggttggcttgacctgtggacatatcaaattcaccgttatcattatatataggaaggtcaggacggaatccttgcgcactaaatagtgatgtgttcgcattattttggtctgtataactcatattggcattaataccaaaacgaaggataggcagcacgttcatttctgtagacacacgtgcgttatatcggcttaagtcacctcctttgaccataccttgctgatcgaatactgataatgaaataaggtatttagatactttactgcctccgcttacagtcaagtcggcattatggcggatagcagtttgtttcacttcatcaaaccaattggtgttggcactgcctaatgcagtggaattaggttcaagaatttccaatgcatattggttggacggatcatataccaaggtttctttggcaaagcggcgtactgtttcccgccattcatcaccatataaaatacggaagttcttaatttgaacatcagtggtaacattgtagttgaagctgacggtaggtttggaaccttccactccttttttagtggtaacgataactacaccatttgcggcgcgagaaccatagatagcagccgcagaagcgtctttcagtacgtccatagactggatatcattgggcgaaattgcatccagcatactgggatcttctacaggaactccgtcgatcacatacaagggttcattggaaccggtcaatgacgtggcaccccgcacacgtacacggacagtttcacccggaacacctgtattttgggatacctgtacaccggcagccaagttttgaagcatggaggttacattaggagtgtttaattggctcaattgttttaaacctactgaagcaacagaaccggtcaagtccttaatggaggaagtaccataacctactacgacaacctcgtccagattagttacttcactttccatttttacattgaagacatgtctgttaccaattttctccttaaccgtctgcataccgataaagctgatcattagttcgtcatttttagtattttcgggataagacaacatgaactgcccatccatattggctacagtaccgaaagttgtaccttggatgacaatagaagctccaatgaccggttcacccgtatcatctttgataactccggtaatcgttctgcgtttggcatttctgtcaatcggtaatattaacacataattgttttccactaactcataacgcatacctgcctggctacaaatcactgaaagtgcttgctctaaaggttctttgtttaatgttagtttcaaaggtacattgttcaaagttgcatcttcgtacatgatattaattccggtttgctttttgaccatgttaagggcctctttcacactgatgttttcacttttgatagtgactgtcttatcagctgatacatttgcaaacacagcgttgaatgtgcagaatatgcacattagcattactaaaaacctcatttttggaggtttagctactaaactcttccaaagctcgtttcttttcataaaactcaaataacttatttaataatttagaatattcctgttatacagggcttgattattgtttttttactaatatggtttctccctttttctcaaacttgacatcggatacacgatgaatgatgtctagtgcaaagtccaaaggcttgttgcggaaaataactccggtgaatttcatggtttctaattccttggatgctatttgaatatctacattatagcatcgggacagacgggctatcagcaagggaaatggcattgcgtcaaattccatagcgccctcagtccatgaaatatagaattcaggatctactttgtaaacttttgattgtgcagaagagtaatgttcgcctggtagtagataatattcacctgatggagcatttacctttaattttccttcaatcaaggttactgataattcttcatcgggataagccgagatattgaaagttgttcctaatacataaatagtatggtcgtgtgtttttattatgaaagggcgggcttcatcgtgtgtaacctcaaacatggcctctccttccaaagtaacttcccgggtatctccgaattgaaccggaaagttgatatgggagtccgcattcatttttacttttgtgccgtcagccagtactattgcgtattccgaacctttgggtactatgattttattctgtaataattcagcatctggttctggcttatgaggataattactttcttgtgggaatgtgatctctccattgttgatacgacttccattgatttcccgttggctgttataaagtggaactacagactggtttgcttgtacccaggtggctttaggagtttctggattttgggaaagaggtgattgttgtgattgttcgctttgggcaataacaggtgctaggttccggtcattgaaatataaaatggaggtaatccctatcagtattgctattgcagcggctgaggaatagactacgatacggcgataaatactaccggattggttacaacgattttgaagtgacttccatgagccttctttatcaaactgatgtaataagttaagttggttgtttacatgatggagtgaaagtaacttcacaaaaatttctctatgcgatgcgtccttttcaatccattgctttaattcttcaaattcctgttcattgagttgatgggacaggtatttttgaattagaatttccgttttattcttttgcataattgttgtactgtttaacagaagtatcacaattacacaaaatgggtgacaaaaatctgaagaaatttataaattaaataagattaggatttctgtcatattgaaacgacgcaacatttttagtgcgcgtgataggtgggtttttactgtatttatggaaatatggagctcttcagctacttctttgtattttttgtcttccagaataattttgactaaaacattatactcttgttccggcaatttttttaattcggccagtaattgattccttttttgcaatagctcttcttcatcataaaaatcatcgataggagaataagattcttcttccatttcgtctaaagaaaagtaacgttcccgttgtactttggtcagtgaggagaaacggacggcattgaatagccatgcgtgcagattggaggaaatagtggtatgcgagtttttatcccaaaaactcacaaataaattctgtacgatatcttctgatgtttccgcagaacctgtgaactgtacagagtagagacataaagggagataataagtatcatacagtagacgaaaggccttttctttgttttctgcaaagagagctagtatcctttcgtctacttcattatatctattgtattttcttgcattattgttcatggatgccttttgcggcacaaaattaggaatttaaccgacacgatatacgactttcatggattaaaaatgcaaaaagtacaatgtattatgaatattttctttatttttcaattctgaaccagtcagcgtccgtccatcctccgtcattggttacaatagcggggcgcgtacagaagatacctaccttggctcctatccatttaccttcttttacttggaaagtttctcctaatggctggaatttcttgccgtccgtactgtagctgaggttacatttcactaataagtcgtgaccgccttcactggctttaatcttgtctccttttgcggaaaatttagcgcgaagatagattgtgccgtcttttaagggaacggaagcatttactttttcagtagctccccgatcggctttcaggcattccacttgtgacaggacaagtccgttgtctgtgttttcaacaactaatccggcataatccattcccattacaaccagtcccgtgcgttcacctttatatttttctgtcggcttgaaagtaagtttggtggtggcagtaaaattgggagccggggttttttgtagcatcagattagaaacatcccataaacttttataatcttcgggaactgggtaggagtatagacgtacaaatccttctcctccgttgaaataagcccatttttcattgatgttagcctgccattgccattgaggagacaatgtataaccatcaaactcatcactttcttgcggggtacaaataggatagttcttacctacattaggctttttataagtcagaacaggttcgccacaaccatcgccgtctttatcaacacctataacgggccagtcatcaacccatttcataggttgcagatggactaagcgtccgtaagctcctacgtcttggaagtgcatgaaccagtcctctcccgtaggggtgtctacccaaccgccttgatgaggcccgttgacgggagagttgccttgcgctaatactgttttccattcgtatggaccgtatacgttttttgagcgaagtacgacttgccatcctgtaggaacgccgcctgccggatggaagatgtaatagtatccattacgtttatagaatttgggcccttcacaagtttgatgtgcttcatgaccatcgaaaatgatacgggattgtgtgatagctttacttgcatcggcacttagctcacaaattgtaattacacttttcagtccggcccggcttcctgcataagcgtgaaccaaatatacacgaccgtcatcatcccataatggagtcgtgtcgatgatgccttttccggctttcaccaaaactggctcgctccagggacctttcggatctttggctttcaccatgaatgctccttggtccgggtcaccccagaatatatagaattcaccgttatggtggcggatactgggtgcccatacacggttgccatgttcaggacggacatcggtaacagggggcagtgcgtagggtacagccgcacctatgatagtccagttgacaaggtctttggagtgtaatatttgtaaaccgggcagacagttgaaactggatgaggtcaaataataatcgtctcctacacggcaaacgtccggatcggagtaatccgcatacaggactggatttttgtaggtcccattgccttggtcggccacccaggcttgggatacataattctgtgcgggagcagataaaaaacagcctcctagcagacagagagtgattagtcgtttcatggttttagattttttatttaattgtaattttgcaaggatgttccaattcttttctccattggggaagataattgaaccagtctttcatatctttaaatccgaaactttctttttttgaggtgaaagtaacgtaatagtggaaatgctgttgccccggtgcttgtaaggtatataagtagtttgatccgtcttgtacttctttaccgatatatttaggaatgaaagttcccatacctgttgtttccttcacataacctatggtgtctgtgacaggccagtcggttccccagcttccagtcagtcctttatggtcgctcatgtgacctccttctttcagaatctgtacacctgctgcaaagacttcctgtttaagcggacggtcaaacaggacatctaccttcatgtcccgatgaccgccatagatggtatatcgattgatcatgttcaaatcgttcccttgatattcccaaccgatgacttctgcttcgacgatggcacgtacaggaccggaggctagtacacgttccgtgcggtttactactggttttatgtgggtcgcttcagtaccattccaaccttttaatgcacctacaccaccactattgtaaacacgtagcgcatcatctccgtagccgttggcgcgttgcgctttggtagggtagaaacaagtctcttttatttccagtcttttatttactttgctatatggatctaccgtctgtttttcgttgaaatagatacgataggcaactaattcactctctatagccggtccgtgatggtaaacaaaactatatacattctcggttcctgccgctgaaaatcccgtaatattggcgaatttgttgttatgtccgtaagctttcatttgggcataagtacgtgccggatagtttttttcacttttttctgaagagagaattatacggaaacttttgttgcttttggctggcatatcgataaggaaagccagttcgtcagcacgtgcgtcaccgttcagatcgtccagttgggacggaatttctttattaccttcccatacagtggcggatttgatgttgaaacctgctttcaggttatttaaatctatcactatcggttcgtcggtcttattttgattccattcattgctgacttctacggtcagtgtcttttcgcctttttgtgcaaaagagttggtaaagcatcctgctaataatgtgaggacaataattgagtgctttttcataatgatgtatagtttattattttaagcacggatcatacggattacacagtgttagtatgaaaaccgtgtttatccgtgcaatccgtgctttactatttttataaattaagtggagaaatgcactaatgggtgtaagaattagaagttgagttcttctccttgtgccccgatttcagcatgattctttccgtctatcgttacattggaaacattttgcatcttcaagttctttccactttttaataactctattttgatatttttcatattaacttcgtcggcttcgcttaatactacaccttctttagcattagatacgatgatattctccatattgatattcttgattctcatctcaggcaagccattgaagaacacagccctgcctgctccgttacaggttacatctttgataaagatattacggaatatcggagtttcttctgttacaggagggatggtagtttctgctttcttttcatcctgattaggatcttcaccacgaccttttccaccatagtataaattgaatattaatgcttcgttcggaatattaatcatgttgatattgctgatgtagatattctctaccaatccgccacgcccacgattacttttaaagcgtaagccaacatctgtacccatgaaagtacaattgtctacatatatgttgtttacacctcctgacatctcactacctacaacaaaacctccatgtccatgtaatacggtgttgttcataacgataacattttgacaaggttcaccgcgtttgcgcccttgttcgtcctttcctgactttatacagataccatcatctcctgcatcaaatgagttgttgataatcaatgctttattacatgattccaaatcaagagcatctccgttttgtgagtaccaaggattagaaactgtaactttattaattgtaatattttcacatgatagcggatgtaagcaccaactgggtgaatttttgaatgtcgctccttccagcaataccttattacatttgatgaaacttagcaatacaggacgtaaccagtcgcgcatgtagtcccagtcagaatcggtaagttctccacgaggtacgttgaagttgtcttttgacaggatagcacctttcaatgcaccttcactgggataccagattcttccgtcggtatctaccacaccaccggaggcgaccaattttttccattggccttcagtcagtttatcttttttggtcggacgccatgtgtctccatttccatcaaatactccgtggcctgtaatcgctatattttcagcattacgtgctgaaataggagactggcaacgacgggtttccaaaccttcaaaagacgtgtttataatgggatatagtgaatggtctgcactgaataatactaatgcattcttttctgtatatagattcacattgctcaatagttcgatgggaccggtcagccacaagccttcaggaataatgactttgccacctcctttggcattaacctgttggattgcatcattaatagcctttgtgtttaaagtgataccgtctggcttggcaccgaaatctatgatgtttaccgaatagtctggaaaagtaggttgttcaactttatccatcttgaaagggaggcttgtatagatggcgggatctataatatcttctacaatagtcgtagacggacaattattacatccggtcaaaaaaggaattaaacatgtggcaggaagtaatagaatcttctttattaaagtagtcattggtattatatatgtttaagattaataattatctagttgattgttgctttaagaagtcttatcactctcccgtaaaagaccctcacgggctatttacgggagcagcaataatgtttcatgttaacctaattctaaccttaaataaatattatgaaaaaacctcttaattcgatggcaaatatagctgaaagaattgtcctttatgtgcactatttgatagaataagtggattttttgttaaattctcatttagctgaaaccttaaatggtaaaaattagttttataattgcattatttcttcatttgtgtgcaaaaaaagctatgattaatttatttgtttgtatctttgcaaactaatttaacaataaagaaggtatgagttacaatttgttgaaaggaaaaagaggtattatttttggtgcattgaacgaacagtctatcgcatggaaagttgctgaaaaggctgtagaagaaggtgcgtccattacattgtccaatactccggtagctgtccgcatgggagaagtttctgctttagctgagaaactgaattgtgaggtaattccggcagatgcaaccagcgtagaagatttggagaatgttttcaaacgttcgatggaaatattgggtggaaaaatagatttcgttctgcattctatcggtatgtctcctaacgttcgtaagaaacgtacttatgatgacctcgattatgatatgttgagcaagactctggatatatctgccgtttcgttccacaaaatgattcaagctgctaaaaagctggatgctattgcggagtatggttcaattctggctttgagttatgttgctgcacaacgtacattctatggatataatgatatggcggatgcaaaagcattgcttgaatctatcgcacgcagttttggttacatttatggtcgtgaacatcatgtgcgtgtgaataccatatctcagtcaccgaccatgactactgccggttcaggtgtgaaaggtatggataagctgtttgactttgctaaccgtatgtcaccattaggcaatgcttcggcagacgaatgtgcagattactgcattgtaatgttctctgacctgactcgtaaagtgactatgcagaatttatatcatgatggaggtttctccagtgtaggtatgagtttgcgtgctatggcaacttatgaaaaaggtctggatgaatataaagacgaaaacggaaacatcatttacggataagaaatagatgatgcgcaaaattatattcatattagtagtatgtcttgttgctctttcctcctgtcagtgggatgggaagagtggcaatactgctgatgtggatgtaagagttgcccgttatgatcgtttgcagtatgagtatgtcacgatgaatagtttctcggcactgcaaaaaatgaatacggactatcctcaggttaccaaactgttgatagaagatgtattggcgataggtgaggtggatgacatgaagattaacgaccggatgttggaatattattcggattctactttattgactttgatgcacgatgccgaagagaaatttaaggatcttggttgggttgaggaaaaactgaccaaaggtttcaaacgtttgaaaaaagaggttcctgcattgttcgttcctcatttttatgctcaaatagctgctctgaatcagtctgttgtagttggggacagtattttgggttttagtattgataagtatatgggagcagattatcctttatataaacgcttctattatgactatcaatgtcgcagtatggagcctgatcgtattgttccggattgttttaccttttatttgctgagtcagtatcctttgccatggcagcctggtcgtactttattagatatgattatgcatcgtggaaagataaattggatagtggctcatattttagggtatgaatcttttgagaaagagatgggatatagtgaggatgaggctgagtggtgcaggaagaataaaacaagtctgtggaagacaatggttgaaaatggtcatttatatgctaccgatccccttgttgtacgtacttatatacgcaaggatccctttatttctattatgggtgagaaaactcctgcaagtattggagtatggatggggattttgctgattgatgaatatatgaaaaagcatcctgatatgacaataaaggatttgttggctaagacggattatcatcagatgttggctgaaacagatttcaaaccttgatattttgattgattagtagtatgatggaagttgctttgtatctattgcctgtcacattaggcgaaactcctgtggaaaatgtgttgcctgtgtataataaagaggtcattctcggcatcaaacattttattgtagaagatgtacgctcggcacgtcgctttttgaaaaaggtagatcgcgggattgacatagatgcattgactttttatccattgaacaaacatacttctcctgaagatatttccggttatctgaaacctttgttggccggacagtccatgggagttatttctgaagccggttgtccggctgttgctgatcctggagcggacgtggttgctattgctcagcgtaagaatcttaaagtggtgcctttggtaggaccttcctctattattatgtctgttatgggatcgggttttaatggacagagttttgcttttcatggttatttgcctattgagcctggtgagcgtgcgaaacgtattaaggtattggagcaacgtgtttatgcagaagatcagacgcagctttttattgaaactccttatcgtaataataagatggcggaagatattcttaagaattgccgtccgcaaaccaaactttgtattgctgccaatattacgtgtgaaggagaatatataaagactaagacaataaaggagtggcaggggaaattgccggatttatcgaagattccctgtattttcttgatttataagtaatgcgggacattcattaaatattacaaaatcagccaactaattcatacacaaagtattgcgaattagttggcttttttgtatctttaggtattcccccgaaaataagatttgacggccaaaacgggggaaatatccaaactaataagatatggcaaagatagtgaatatttcagaaattcaccctactttgggttttacagaatttgatattctggaaaaataccgcaagagttttaatgagagtgagcttggcaagcttcattcggtctttccgtttgaatgtatggcaaaagccgccggcctgtcggaccggcgcctgggacgcaggaacagattcagtccttccgcaaagatcgcccttatggtcctgaaggcatacaccggattctccgacaggcaactggtggaacatctgaacgggaacatacactaccagattttctgtggaattatgattcccccgtcccttcccataaccaacttcaagatagtcagtgccatccgtaatgagatagcatcccgccttgacattgattctttccaggagctcctggcttcacactggaaaccttatcttgataaccttcacgtctgcatgaccgatgccacatgctatgaaagccacatgcgttttcctacggacatgaaactcctttgggaaagcctcgaatggctctacaggcatatatgccggcattgcagggagctgggcataaggcgtccgcgcaacaaatacaggaatgtggcggaatcctatctgtcctactgcaagaaaagaaagaggagagcttcaaggacaagaatgcttaagcgccgtatgatcaagcttcttgaaaagctcctcagtcaaagggatgggatccatagcgagtacggtgctttactccgatatacccaggattatcataagcgtctttccatcatcagaaaggtgcttgtacaagaaaaggaaatgtttgaagggcggaaagtcagtgaccgcatcgtcagcattgaccgtcattatgtacgtcccatcgtcagaggcaaggaaaccaagtccgtcgagttcggtgcaaaggtcaataatatacagatagacggcatatcgttcatcgaacacctctcgttcaaggcattcaatgagggtatacgcttgaaggactgtatccgtatgcagcagaagcttatgaatgtaagggtaagatgtgtggctgccgattccatatatgccaataatgccaacagaaagttctgtacaaaatatgggatatccacatcctttgtgcgcaagggaagggcggccaaagatgagcctttgaggaaggtgcttagaagcgaactctcaaaagaaagggcaacacggcttgaaggaagcttcggcactcaaaagcaacattactcgctctcaaggataaaggccagaaacaggaagacggaaatactgtggattttctttggaatacatacggcaaatgccatactgataatagaaaaaatcagaaacaaaacagctaaagcagcatgatatgattttactcacagaatcagaagaggtcatcagacttcttccggaacgtcatgtcctgtcggatagaagtatgtgagaaagcacggaaaaatgacaataagaatggcatatgaaatggtcatgccctatcatcttcatatgccatcttattttttagagacatttactgaatatccctaatgcgataacagatattcatttaaattcctcccacatctgtgtcactatgttcagatgatctatttcttcttttagaaaagaactatattgggcagaattcatttctatttcttcgggagttacaaattttcctccggtaaaatgtatctgttcttcatcgtttaaaggaagaatatatagcatgatggtttttttaactccattggtttcttttaccaaatgtttcaaactgaagcgtggttccggttgtccggtaatatggttgctatatttattttctacttctttggcatatttatcagtatctgtcttgcaggcataaatgtagtcttccataggtatgtccaacttgccgggttcttcaccttgataactgcggggagcaacatagatctttccattgcaaataggggcgatacgtaaaaaaggcatttttttataggttaaactgattgttttcacaaaagcatgattgacaataatgcaaatgacatatatcaaaggagggatgatgtgggtcatagcgtaaagggtattataagatagtggactgaaaaataaataaattatgcaggaagcaaacaggtgaatgccggataaaacagctataacctgtgtggcccaacagttcagaatagatatcttataatgaaagtaggagaatagttttgtataaaaattggggaccatgagatagagtagtgaaaaacagagtatcagtatttctagcgtaatgggaactgttcggtccggaataagcatatctccgcttatgccttttatgatggatgcaatgattaatgccaaagttccatgtagtaatactagatttggctgataaacaggaggtttgacaagtctgtataggatataaataatgctagccaaactacagacatacaaaacaactgcatcttgaaagaaaatgcagaaaatcatgcatacaatggctggtattaaccctgtggacatgattaaatttttgtattccagtaacgatttcattctctctatctctatttatatctttataacaaaaaagatataaagttggtttactcgttaccctttaaattttatatgtttttctgcatgataggaggaacgtaccaaaggtgcgctttccacttctcggaatcctttctttaatccaattgttctatactgtttaaattgatcgggagtaatatagtccgctaccggataatggcggtgggtaggttgtagatattggccaatggtaagtatcttgcagccttgtgccaataaatcgtccatgacttcttctacttcttccgggcgttctcccaaacctaccataataccggatttagctgtaataccattattggctatttgtttgatgacctttaaactggttgcatagttggctgcgcttcgtaccaggggactgatgcggcgtacggtttccatattgtgtgaaatgatgtctggtttggcgtcaatgactagctgaatcagttcgctctttccttgaaaatcagggattaaaacttcggttgtggtttccggattcaagcgcttgatttctgaaatcgttttagcccaatgggcagcacccaaatcatctagatcatcacggtctacagaggtaataacggcatgagataatttcatgagttgaatggactctgctacatgggtaggttcttcagggtctaacggaagaggccgtccggtctgtgtgttgcaaaatttgcaggaacgggtacaaatttcgccacctatcataaaagtggcagtaccttttccccagcattctcccatattgggacatcgtccgctactgcaaatggtatgtagtttgtgggaatctacaatatgtttggtttcggtatatcgagcatttgcccctatgtttatcttaagccagtctggttttttaacgtgattcatgatgatattagatttataattcaccacagattataccaatgcaaattgttttcattcggtttttatgtaaaattatataatctgtggtgaatggttttttattttaaattatcaataaagaaattggctacgcgagtcagtaaatgtttagttgtgttgcctccactgattccatggttgcggttggtatagatttgcatgtcaaattgcttgtcggcctgtaccaatgcttcactgtattctgcgttgttacgtaagtgtacattatcatctgctgtgccgtggatcagcaacaattcaccgttcagtttgttggcacggttaatagcagatgcagcattgtaaccttccatgttttctttgggggtacgcatgaagcgctctgtatataccgaatcgtagaaacgccagtctgtaggagctgcaacagctactccagctttgaatatcggtgttccttcactcatggacattaatgtattgtaacctccatagctccatccccatataccgatacggttaccatctacatagggtagtgtacttaagtatttggcggcttctacttgatctttcgattcttttactcctaaactcaagtaggtgcatttttcaaaatcagaccctcggccaccggttccgcgtccgtctacacaagccatgatgaagccttgaccggccatataagcttcgaacatgccgccatctctacgggctccaattccccatttgtctgcaacttcttgtgaacccggtccactatattggtgcatgataacaggatattttttgttcggattgaaatttgcgggtttcattatccaaccattcaattccacaccgtcattggtcttgaaactaaatagttctttacttggcatattcagacgtgaaacttggtgtttcaatgtgttattatctactaaggttgccaattctttaccattattgtcattaagggtaatgacaggaggggtgttgatattagagtaagtattgatgtaatacttcatattgttactgaaaatagctttatgagttccttcctgtttggatagtttggtctttttacctttgccgtccactttgtagatagcggtgcgtagcggactaccttcattgctttcaaaatagaatgtgttggtagcttcatcccatcccaggaaatctttcacttcgaagttcccttttgtgatttgcttaaccaggtttcctccgctagtgtaaagatagagatggttataaccgtctttttcactcatcaccacaaagttttttggatagaaaacgatgttggagtaggcttcttctttaatgtattggggagcttcatcacgtaccatcagtttacacaatgtacttcgtggattggcaaagtagaggtcgaaacggttttgatgacggttcaaagtcatgattgccaacgcattctcatcatccgtaaacttgatgcgagggatataactgtctgcatctagaggcaagtccatcttgcgggttaccttactttttatatcaaaagtatgaacggttactttggaattgtcaattcctggcatagggtatttgtattcatattctcccggataagtgctgaatttctctaatgcgggaaccatacctttgtataatggaaaagaatacataggtacttgactctcatcaaaacggatataggcaagcatctggctgtctgcactgaagtcgaaagcacggttgaagccgaattcctcttcatatacccagtcgggaataccatttagcacttcgttgaatttgccgtctttggttacttgtgattcactgttgccaaacaataattttaccagatagatattattatcacgtacaaaagctatctgattgccatccggcgagaataaaggaacctgttgtggaccgttttctgagagcggttccattttattgttttttacgttgaaaatatagtaattggcggtaaacgaacgacgataaataggtttggtttcagtctgtattagaatcagtttttcatcgggtgacatgatatagtcatcaaatgacttgatgctacagtcacgggccgtatttacatcgaagatggtgcctgtttctttgccggtcttgaaagaatactgtatgatttttttgccatcggcactcatttgggtataatgttctccatccaacatcggtttgatacctctgattccttcggcacgatacgttctgtttgctacgtcttgcaagcttacttgttgggctctgactgtcagcaagcagaagaataaaataataaatatacttaattttctcataatagataaattctttaaatgataatcaaagacaaaggtaaaacttttgtttgaaaatacgtatctttgtcccgcaaaataagttcatgaacagagagatgctttataacgacttatccggctttttagctatgcactttccttgcaaagtgcagaagatttctattaatgccggatttacttgtcctaaccgtgacggctcggtaggatacggaggttgcacttattgtaataatcaaacatttaatccggcctattgccatacgggaaagtctgttactcagcagttggaagaaggaaagcggttctttgtacgcaaatatccggaaatgaaatatctggcctattttcaggcttataccaatacgtatggggaactggaagagttgaaaagaaaatacgaagaggcactgatggtagaggatgtggtaggactggtgataggaactcgtccggactgtatgccgatatcattactggattatttggaagatcttggtaaacgcacttttgtattagtggagtatggcattgaaagtacggatgatgaaacgttgcgccggataaaccggggacatactttcgccgtttctgcggaggctgttcggaagactgcagagagagggattttagtaggagggcatataattcttggtttgcccggagaagaaagagaaatgttaatcagacaggcaggagtactttcacaattacctctgactactttaaagctgcatcagttacaacttattaaaggtacgcgcatggcgagtgaatatgtgaaagagcctgaagctttccatctttatacagctgatgaatatgttgatttggttattgattatatagaacatcttcgtccggacatcgtactggagcgttttgtttcccaatcacctaaagaattgttgatagctcctgattggggattgaaaaattatgaatttacggataaggtgaaaaaacggatgagagaaaaagatgcctggcaaggcaaatactataaatattaaaagaagaaaacagatatggaaatcaaaggaaaagtacattatgtgggagtgaatgaccgtaacaaggctttgtttgagaacttgtggccgttaccttacggtgtgtcttataactcttatttgattgacgacgagatggtcgctttggtggatacagtagacgtatgctattttgaggtttatttgaagaaaattcgtagcattatcggtgataaacctatcaattatttgattataaatcatatggaaccagaccattccggttctatcagtttgatcaagcaatattatcctaacattgtgattgtcggtaacaagaagactttcgaaatgattgaagggtattatggtgtaggcggtgagcgttatgtagtgggtgaaggagattttctagctttgggacatcatagactgcgcttttcattgattccgatggttcactggcccgaaacgatggttacttttgatgaaacggaaggtattttgttttccggtgacgctttcggttgttttggtgcattgaatggtggtgtagttgatacaaatattaatacagatatttattggaatgaaatggtgcgctattattctaatattgtaggcaaatatggtgcgccggtacagaaggccttacagaaattgcaaaacttgaaaataacgactgtttgttctactcatggtccggtatggacagaggaaattcctcgtgtggtacgtatttatgaccgtttgagtcgttatgaggccgaagaaggggttgtaatagcttatggctcgatgtatggtaatacagaggaggtggcagaagctattgcagaagaactgagcaagcagggaattcgtaatatcgtgatgcataatgtttctcataccagtcattcttttattattgcggatgtattcaaatataaaggactgattgtgggatgccccacttataatactcagatgtatccggaaatggaagctctgctgagcaagctggcttctcgcgagataaaggggcgttatctgggatattttggctcatttacatgggctagcgctgctgtgaagaaaattgcagagtttaatgataagttgaaatttgagcctgtcggaaatcctgtagaaatgaaacatagcatgaaggccgaaactaacactcaggcaaaggagttggctaaggctatggctgatcgtttgaaagcggatagaaaataaatcttgtgatagcatacaaatgacgcaaatgacacatgattgataagatcaagcttgtgacaattgcgtcattcgtgttctaaagagggatattcagtaaatgtctctaaaaaataagatggcatatgaagatgatagggcatgaccatttcatatgccattcttattgtcatttttccgtgctttctcacatacttctatccgacaggacatgacgttccggaagaagtctgatgacctcttctgattctgtgagtaaaatcatatcatgctgctttagctgttttgtttctgattttttctatcatcagtatggcatttgccgtatgtattccaaagaaaatccacagtatttccgtcttcctgtttctggcctttatccttgagagcgagtaatgttgcttttgagtgccgaagcttccttcaagccgtgttgccctttcttttgagagttcgcttctaagcaccttcctcaaaggctcatctttggccgcccttcccttgcgcacaaaggatgtggatatcccatattttgtacagaactttctgttggcattattggcatatatggaatcggcagccacacatcttacccttacattcataagcttctgctgcatacggatacagtccttcaagcgtataccctcattgaatgccttgaacgagaggtgttcgatgaacgatatgccgtctatctgtatattattgacctttgcaccgaactcgacggacttggtttccttgcctctgacgatgggacgtacataatgacggtcaatgctgacgatgcggtcactgactttccgcccttcaaacatttccttttcttgtacaagcacctttctgatgatggaaagacgcttatgataatcctgggtatatcggagtaaagcaccgtactcgctatggatcccatccctttgactgaggagcttttcaagaagcttgatcatacggcgcttaagcattcttgtccttgaagctctcctctttcttttcttgcagtaggacagataggattccgccacattcctgtatttgttgcgcggacgccttatgcccagctccctgcaatgccggcatatatgcctgtagagccattcgaggctttcccaaaggagtttcatgtccgtaggaaaacgcatgtggctttcatagcatgtggcatcggtcatgcagacgtgaaggttatcaagataaggtttccagtgtgaagccaggagctcctggaaagaatcaatgtcaaggcgggatgctatctcattacggatggcactgactatcttgaagttggttatgggaagggacgggggaatcataattccacagaaaatctggtagtgtatgttcccgttcagatgttccaccagttgcctgtcggagaatccggtgtatgccttcaggaccataagggcgatctttgcggaaggactgaatctgttcctgcgtcccaggcgccggtccgacaggccggcggcttttgccatacattcaaacggaaagaccgaatgaagcttgccaagctcactctcattaaaactcttgcggtatttttccagaatatcaaattctgtaaaacccaaagtagggtgaatttctgaaatattcactatctttgccatatcttattagtttggatatttcccccgttttggccgtcaaaccttattttcgggggaatacctaaagatacaaaaaagccaactaattcgcaatactttgtgtatgaattagttggctgattttgtaatatttaatgaatgtccctaaagatttctgacgttaggcttgatgtacagtaagctgtgggaatgggaagttaattccttctttattaaaagtagtataaacagtctgattcatactgaaaaatacgttccagtaatccgaactattcacccatacgcggatttttatatttacactgctggcagcaagttctcctaattcaataaaaggggcaggactggtgagaatacgtttatcattggcaatgatttcgcgcaatactttttctactttattatagtcttctccgtagtccacgccaaaattccattctatacggcgggtgtccagtttgctgtaatttgtaatgaccccactactcatggctccattaggtacatatatcatcttgttgtctgcagtgataagaatagtatgaaaaatctgtatttcttttactgttcccgaggcaccggtagaagcttcgataaagtcccccactttataaggcctgaacaataagataatcagtcctccggcaaaattttgtaagttaccagacagtgccataccgatggcaacaccggcagaagcgagaagtgcggcgaatcctgtcagttcgatacctaatttccctatcacagcaaggatcagcataatgagcagtaggatattcaccatgctctttaggaatgactggatactcgggtccacttttcttttttccaaaatacgtgcaaaaagtctgttcagccaatttacgaggaactttccgattataaaaataataagtgctcctaatactctttctcctaattgaatgccggagtcgataagtttctctaatgcattggttaattgaatacttgtttcagatgctaataacatgataaatttactttaatttgacatttctaatatataaaacaattcagattaaaaatcgttcagaatacctttaccttgacgtacaatttctgcttctccgtttgtacagttcacaatggtagaaggttctatgcctccgattcctccgtcaataattagttctacctctttgccgaatttttcttctatcagttctggagtggtaatatattctatgtcttcgccatctttcagaggcaacgtagtggtcatgatgggtgcttttagtatatggcatatttccctgatgatgttgttgtctggtacgcgtatacctacttctttacggttcttgaatattttgggcagacggtttcccgtattcaggataaaagtgaacggtccgggaagattgcgtttcattagcttgaatgtgctgttgtctactttggcatattcgctgatattgcttaagtcgtaacagataatggataaattgtttttacgtggatcaatgtttttcagtttgcagatacgttctattgcacgttctttcagaccatgacatcctatggcatacatcgtatcggtagggtaaataattaaccctccctcttccaatacccggattacttcttccagatctttgggattattattcttattataaagtcttaaaagcatgttattttaatttttagattttttttcacgcaagcgttctgcaatagcccattgtagggcggcttcctcttcttttccgactctcatcaatgcgtctccgaaatattcatgggccttcggatgttccggctttaaagaaacagcccggtcaaaatctcccaaagctccttctatattatctaatgccagtctgtttttccctcgattgtaaatagctttgaataaagcgggactaaggcgtaccgcttcattcagacaaacttcggcttcgtagtattccttgtcattatgtaatgtgatacctttacgtacccaagcgtccgtataagaagggttcaattcaatcgctttgtcataattggcaatagcagcacgtgaatcatgtgcctggatgatacattcatttcccattaaataatattcgcgggcatatttttcaagatttttgcgttgtacatggaattggtcttttagccgtttgttttcgactttcaaattgttgatgattcccagcttcttacgtataaatcttttgatcaaaggtttttcgatatcataacgtgaatggatggcaagaaagaattgttctagaaatctttcaaaatcacctttgtcgaagtgttgtaccgcttctacatattgtacatcagcttgtgcctgcttcaatgctttttcaatggactggcggttattgaatcgttgcgagaactttactatttccgggcggacaaagatatctccacgtgtaatttgcttttttagttggatgccgtctagtgaagtacagcggctcaatgctacgtaggcttgtccaccggcaaacacccctcctgtaaaatcaataacgaccctgctgaaagtcaatccttggcttttgtgtatcgtgatggcccatgccaaacggataggatattgtataaatactcctaattcttcttcttctatttttttttctagttcattatatttatatcgtatattgcgccaactgtcttttttaacgtcaaattcctgtccgtcttctgtgataacatataatgtatcctcttcgtctatacctgaaatggtgccaatcgtaccgttcacccaacggtggtcgtaatcgttttttataaaaataatttgtgctcctggttttacttccagttccatttgggtggggaggctgctttctggaaattctccgtgtatctcaccggtcagaatcgttgattctccaggtagttcagataatttcttttcattgataaagtctacggtgtctctccgggtagcaagtgtgatatacatatcactttcattttcttctatgtgagtgttgtaacgggtgttcagtagttgcaagtcggctgctccggcagtattggtccggatatgatccaatacgttaacaaaaattttgtccgactggcggtatacttttgtcagttctatggataccagctccatttcctgaaagacccgtgccgaaaagaaataaggggtgggatagaagcggttgattatctcacgttcgtcatttttaatgactggttcaagttgaaaaacatctcctaccagcaatatttgcttgcctccgaatggttcacgcatattttgtgaatatacccgcaatattttgtctataaagtcaataatgtctgcccgaaccatggaaatttcatcgatgatcactaattctacttcttttatcagttttcgatgagcggaagtatattttagaaagctatgtaactttccatctttcaaactgaatttaggatcatccggtaaaagtggatagaatggtaatttaaaaaaactatgcagtgtgcttccaccggcattgatagctgcaatacctgtgggagccagtactatatgtttctttttggttacttcgcaaacatattttagaaaagtagatttacctgtacccgcctttccagtgaggaatactgactgacgtgtatattggataaggttcaaggcatcttgaaactctttattatgggtgtctacttgcattttgtccatacgtttgaaaatgaatggacaaagatagtggaaatcccgtaaaagggcataaaaaagacggttaaataaccgtccttttttatagtcctacaggggattgccctgtattggttctaatttactttgtttcgttcaacataacgtaaccccaaatcataggatcagcgttagcaattttgtgaaaaatgttttttacctttttcataatgttatcctttctttttttaattaatacctaaaaacactcataaatagcaggcgcacctcccggttggccttctttaaacaatctttctttttaccttagtagctactaaaaaaatatctttttatgttttacaacacaaagataaggagtttgttcgttatgatatatgttttacagcatatttttaatcgatatctcaattttattgatttaggtcaaaaaaagtaggagtttcttattgcattttggtgaatattttgtttgcttctgtcgtataacatataaatcagtttgtttatctcaagaagtattgcttgatttgtgatatcataataatatcaaaaataaatcattatggaaacaaaagaaatgtcttacaatgagctggtaattaatgggtttatggctttgttttttaacttggttatgttgcctgcactagtattcctgaactttttgatttttggacaactaccttggttatctattcctgttttgtttatgctggtattgttgtttgtgctgatgcttccgggatatttttctcaagaactgtagatactaattgaaaagtgcgccaatattccaattgaaaattgcgccaccataggataagtataatgacctttgtataatccaaatgcaaaggtaaaatgaagactatggtagaaagacaatcaataatacacatgtatagagtatgcggttatagcaaacggcgtatctctcgtgaacttcatgtcagccgtcataccgttgacaatattctttcaaagtacgaatcagccatccgcacggacaatccagaagaggctttgagtgatttgcttaccatccagcccaggtatgacagttccagacgccgtcctcgccggctcacacaagagattaaggataagataggattttgcctgaagaagaatgccgttaagatagctaccggacttcgcaaacagcgcatgttgaaaaaggatatccaccagtttctgttatctcaaggatacaccatcagttacgccacagtatgcagttatataaaaaatatagagtcatacaaagagaagaaaaagagcgaagcctttatccggttgttctatgagcctggatgcattgccgagtttgactggggtgaagttcttctttttattgacggcgtcaaaaccaagttttatctggccgtattcactttcgggcatagcaatggcagatacgcctatcttttcaggcatcagaatacgcttgccttcatggaatcccaccgtaactttttcagggatatacatggtgtccccgccatgatggtctatgacaatatgcgtgtagccgtcaagagctttgtcggtggtgataagaaacctacagaagctttgatgaagatgtccggtttctattgttttgagtaccgtttctgtaatgtacgggccggatgggagaaaggacatgtggagcgcagcgtggaatatgtcagaaggaaagctttctgcctgacagaccattttggtgatatacattctgcccaggagcatttaaaccgggtatgtatgcaggtcaacaacgagcaaggcagtctttcaacagcggagaaaacatcacgtctggaagctgacctgtcatcgctgaagccttttcccggtaatctgggctgttttgaggtctatgagtacattgtggataaatggtcaactatcagcatgaaaaatgttcattattccgtacctgattctcttgtgggagaaaaagtacatgtcaaggtttatagtgaaaaaatcgtcatcctgtacgggaaggagaaagtggcctctcatcaacgcagttattgcggtggagactggtgcatcaagctggagcactatttgcgtacactttcccgtaaaccgggggcattgccccactctgtggtttggcaaagagcaccggaagaactgagaaggctgtatgacatccatttcaaggaggacaacaggacgtttgttctgttgctggactatgcccgaaaaaatggattttccggaacggacattgtcacggcatgcaaggagctgaccggacgtggtgtcagaaagatatctccggaccaggtaaaggccatgctgcatggtagcgtacagggagagacagaagaaaccatggaaccgcctgttctcccggcacaacaggagaatatagaaagagaagctgtggatatgcttgaaggcatcacggcgctcatgacaggatacaatgaagtgcatgatataataccaaccatttaagtttataatatatgaaatcagaaaaagaaaccatttatgactatgctgcagaactgaagcttctggcctttaaagaggaactggaatgcaccctttcattggcagctgaagaaaactggaaccatctgcagttcttgacggaattgcttggaaaggaaagcgccaggagaagggagtgtagaagaagatcaaggataagatctgcgggatttccacaaatgaagtatctgcatgagcttgttatggaagacatgcccaaagaggcacaggtaatattacctgaattggagacactggacttcatcagacagggaagaaacctggtcctgtatggaaatccgggaacgggaaagacgcatattgctacggctttaggaataaaggcctgccaacaggactttaccgtattgtttacttcagtgccggtcctgcttacccagataagggaggctaaatcagcaaagacactgaggacgctacaattaaggtttgaaaaatacgatctggtcatctgtgatgagttcggatatgtcagttgtgacaaggaaggaggagaactgctttttaaccacctgtcgttaagagccggaaaaaaggctacaatcattactactaatttggcttttaacagatggaatgaaatcataaaggacaaggtgcttgtggcggcaatggttgacaggcttacacataaagcttatctggttaatatgaccggactgtcttataggcttaaggaaacacaaaaaatgagacaagataaatgaatattttaaacttatagtaattttgtaacaagttatggatggagctcttttcaattagaatacagcgcacttttcaattagtatctacagcttttacagggaaactgttcagaaagggcgtcgttatatcaatatttcggaagctattattgatgtttacaagacttcttatgaggatatgacaactacccgcgaccgggtgcaggttttgaaggggcgccggttgctcagtcagaaagtcagtgatacgttgggggtgaaactggctggtggtcccactttatctatctatgtggacattgtgaaaaatcaggatgcgttgttggatatggaaacattgaactattatgatttctttatggaagaaccggtccagatagacaatcgtcagcaatatgtgatcagtttccgtccccgtgtcgttttgccttatgccttgtattatggcaaattgtatattgatcgtgacaagttgtcgtttacccgtgcggaatttagcttgtctatggataataaagtcaaggcagtgcaggctattctagccaagaaaccctatggcttacgttttaagccacaggaactttctttccttgttacttataaagatatggatgggaaaacctatctgaattatatccgtaaccgtatccggtttaagtgtgactggaagcgcaaacttttctctaccggctatactgtgctttcagagatggtggcaacggataggaaggaaaataatgtggcgatcattcccggaaagatggcttttcatcagaaagatgctttttatgataaagtggatgaatattggagcgaggatttttgggactcctataatatcattgaacctacggaatcattggaaaatgcagtccataagttaaagaaacaatcgcgttaaagtctcggatgaggttcgtatgattgaaaagaactaccaaaaaagaagtagatgctgaatgatttgttaacactggccagaataagagagggagatataaaggcgtttgaagatgtgtttcgccgttattattctcctctctgttggtatgccatgagcatcaccggcagtatggaagctgcggaggaaatagtagaggagttgttttatgggttttggagagatcgggagaggctgccgttgttccgttctatgaaaagctatctttatattgcggtgcgcaatcagtcttttcaatattgcgagcatcaggaggtgagaaacaaatatcgggagtttgtcctctcgcggaaggggcggacacaggatagcaatcctcaagaagagatggaataccaggaattaagacatttgatagatgctacgcttgctcggatgccggaacgaaggttgcgcatattccggatgcatcgtatggaaggtaaaaagtatgcggaaatagcctcgcagctttctttgtcagtgaagactgtagaggctgagatgacaaaagctcttaaagcattaaaaaaagaaattgagaattatattataaggacatgagtgaaacaaaaagaaataaggaaagagtggatcaggcatggaataaattgtatgaccgtttggatgctgacggacttttgttatcagaccggcagaatagaaaacgtttgtctgcatccatgttgtggaagtggggggctgtggctgctatatgggtcggaataggtgtctttttgactactacttatcgaaaagtgggcgagccggtggaagttcgggctttaattatgcaggagaacacggagcaatctactttggtgaccacactcgaggatggatctattgtctatatgggtggggaaacctctttgcaatatcctgaacatttctctatggacaagcgtgaggtcagtttgcagggaaacgctctgtttgatgtggccggtaaccgggaacgtccttttctgattgaaacggaggaggtcagaattgaggtcttgggaacgatgtttcatgtaaagagtgatgtagggagtactttcgaactgtccgtacagcgcggcaaggtcaaagtggcattgaaaaataaaaatcaagagatgtatgtcaatgcaggtgaagcggtgacgcttaaaacacatcaattgcgtttcactgattatagggacgatacccggatagcccattattggaaaagtatgcgtttcaaagatgaatctttgatgaatatccttagggttattaatatgcattcttccggtttgcagcttaagacttccccctccttaggggagcgtcggcttacggttgcattttccggggaatctccggagtctatggcagagcttatctgtctggctatgaatttaaaatatactcgtgaaggtgatataggtgttttatccgaataaagtgggaaaatgaatcatattcgtacatatcattattattggcatatcttctttttcagtttgttggtttgcatgacggaatttacgaaagcggcggatagaggtgtgttggagcgagtcatttatcttgctaagagtaagggtactgtctatactttactggggaaggtgtccgaacagtctggtttcctttttgtttatgacagcaaggtggtggacaatgatcgtacggtgaagttgggggcaggacagcgcactattcgtcaggttgtttacgaaattatcggtcggcaggatatcagtctgcatattgtggagaatcatattttgatcaatcagttgcaggtgcaatgtccggttgttaccacttctaaagatactttggcctattttactttagaaggcaagttgcaggataatcagtcgggggctcccattgcttacggcacggtgggggtagtcggtacttctataggcagtattaccaatcagaatggcgaattccgtttacgattgcccgattcgttgagacaggggcgcatcgtggtttctcatgtggggtatgtgggacaggagatggatatgtctttattagaggctcaacacgcggtgtggtctctggagcctcgggtgattcctattcaagaagtggtgattcgtgctgtcaatcctatacggttgttgcgtgagatgttgaaagctaaaaaaacaaattatgcgtcggttcctatttatctcactacattttatagggaaggggttcggtataaacaaaaatttcgtaatctgacagaggctgtttttaaaatctacaaaccttctcctttgttgaatcattttcaggatcatgtaaaactattaaagatgagtcgcatagtcaatagtcaggaacgggatacactgatagccaagataagtgcgggaattgatgcttgtttgcaactggatattgtcaagaacttgccggattttctgttgcctgacgataagggtaatgtgtactcttatgcctcctgtgatatgacggtgatagacaatcgtttggttaatgtgatttcctttcgacagaataaaggaataaaagaacctctttattgtggcgaattatatattgatgctgaaaacaatgcgttggttcaggcgcgtcttgaaatcaatcctgcctatgtgaggcaagctacggatatgtttatagaacgaaagacacggaagtggaaaataaccgcgcaagaggtggtttataccatttcttacaggcagtggaatggcatttattacatgaatcatattcgtggcgatctttattttaaagtgaaacttaaacggcaatggtttagttcttcttccttgcatacatggtttgaaatggttacctgtaaggtggatacagataatgtgacccgtttccaacgtaaagaacggatgcctacacgcactatattttcggatacacattttaaatatgatgctgacttttggggggagtttaatgttatcccgtgggaggaagaactgggtactgtcattgaaaagttgtcttctaaaatagaacagatagaatactaaaataaaagttggatacggagcattgtacttggtatcttttatcatgatatatgatagaatatgttagcctgaagtatgtaagtttgtatattcatcagcctttagcttaaaatcgattcggttgtccggtcaattttttacccgtgtcagaaagcatgcttttacacgtatatctgcataggattacacatatgtatgtgcggacttatgcggatgtatgtggaatctcctatataataactacattaggtttaaaaacaactatgcaaatctgatatagtaataacaatagaagttgttaactaaatcctagtacacgtctgtgaaatcattcacctccaaaagataaggacattttcaaaaaagatcaagagcttttcaaaaaagaacaagaacttttttaaaaagataacgagcttttttaaaagtgtcttggtctttttaccgctaccgggggtgctattatattccgtggagatatgcacactgtttgcgagcaaaaaacaagaacgccctattttacgtcaagttggaatagtctaaaaaagaagtttatataactgaaagtaagcatgttatacagaaataagcttcaaaacgtagtgagggcatagggtataagtgagggcaataatttttactataactacataagtagcttataatgagtttgttttgcacaaagtgagggcatgagggcataattgcatctaactttgcaatgatgatgcgtcaagaagactttcggaaattgttcgaagaagaaaatgatcctttaagagcgaatgccctttcctatgattttgcaggtgagccgatgtttacccaatattcattttagtctgtcgcgcgcgataatataatatggtatatactttttgatattgtaaaatggattatcgaaataaccattttgtataatctgtaaatcagatgtttataagtataatcacaaaaaaaatagaaaaaatagtagatatatttggataaagaaatgaaatcaactacttttgcatccgcttagcaagagaggtaagtttaaaactgacaagatgatttgaagaacatagatgaaacaaaaaagttttaaaaaaaagttcgataattttttggtagtttgaaataaacgctttatctttgcaaaacatttccggaaaaacggaaataaacataaatgagagttctttgaaagatttaagataaacaaacaagtagtacaagccggtgcaccgtatgtaatatatatatggtgtacggaaaaaacaagaaccgtcaatattgatattgatagatttggaatccttgagcagattatcaactgaacagttggaaaaagatattattacaatgaagagtttgatcctggctcaggatgaacgctagctacaggcttaacacatgcaagtcgaggggcagcatggtcttagcttgctaaggccgatggcgaccggcgcacgggtgagtaacacgtatccaacctgccgtctactcttggacagccttctgaaaggaagattaatacaagatggcatcatgagtccgcatgttcacatgattaaaggtattccggtagacgatggggatgcgttccattagatagtaggcggggtaacggcccacctagtcttcgatggataggggttctgagaggaaggtcccccacattggaactgagacacggtccaaactcctacgggaggcagcagtgaggaatattggtcaatgggcgagagcctgaaccagccaagtagcgtgaaggatgactgccctatgggttgtaaacttcttttataaaggaataaagtcgggtatggatacccgtttgcatgtactttatgaataaggatcggctaactccgtgccagcagccgcggtaatacggaggatccgagcgttatccggatttattgggtttaaagggagcgtagatggatgtttaagtcagttgtgaaagtttgcggctcaaccgtaaaattgcagttgatactggatatcttgagtgcagttgaggcaggcggaattcgtggtgtagcggtgaaatgcttagatatcacgaagaactccgattgcgaaggcagcctgctaagctgcaactgacattgaggctcgaaagtgtgggtatcaaacaggattagataccctggtagtccacacggtaaacgatgaatactcgctgtttgcgatatactgcaagcggccaagcgaaagcgttaagtattccacctggggagtacgccggcaacggtgaaactcaaaggaattgacgggggcccgcacaagcggaggaacatgtggtttaattcgatgatacgcgaggaaccttacccgggcttaaattgcagatgaattacggtgaaagccgtaagccgcaaggcatctgtgaaggtgctgcatggttgtcgtcagctcgtgccgtgaggtgtcggcttaagtgccataacgagcgcaacccttgttgtcagttactaacaggttccgctgaggactctgacaagactgccatcgtaagatgtgaggaaggtggggatgacgtcaaatcagcacggcccttacgtccggggctacacacgtgttacaatggggggtacagagggccgctaccacgcgagtggatgccaatccccaaaacctctctcagttcggactggagtctgcaacccgactccacgaagctggattcgctagtaatcgcgcatcagccacggcgcggtgaatacgttcccgggccttgtacacaccgcccgtcaagccatgggagccgggggtacctgaagtgcgtaaccgcgaggagcgccctagggtaaaactggtgactggggctaagtcgtaacaaggtagccgtaccggaaggtgcggctggaacacctcctttctggagaggacgaaagatcgataaggtttttgttcttgtactgctggtgttgtttattcaagatatgattccgtaatgatacggaagagagaaagtaagaagccgggtctaattaaacagactaggttgaacttagtcctatagctcagttggttagagcgctacactgataatgtagaggtcggcagttcaactctgcctgggactacgaacggaatcaagttcgggggattagctcagctggctagagcatctgccttgcacgcagagggtcaacggttcgaatccgttattctccactccatcggaaacgtaagaaacgaagatgaacgatctatgacatattgtacaagcaaacagtaattttagtagtaaagagctgaaagtatatatcatcccgccggcacgcaagtgtgggcgaatggataaggaaagtaaagaagggcgcatggcggatgccttggctctcggaggcgatgaaggacgtgataagctgcgataagctttggggaggtgcaaatgacctttgatccagagatttccgaatgggacaacccaatatcttgaagaggtattatcttactatgtaagaggctaacgcagggaactgaaacatcttagtacctgcaggaaaagaaaataaacaatgattcccccagtagtggcgagcgaacggggaacagcccaaaccatccatgttacggcatgggtggggttgtaggactacgccgttgcatgaagacatcagagaagaactttctggaaagaaagaccatagagcatgacagttgcgtattcgaatgttgtcgaagcatagtagtatcctgagtagcgcggagcacgaggaattctgcgtgaatctgccgggaccatccggtaaggctaaatactcccgagagaccgatagcgaaccagtaccgtgagggaaaggtgaaaagcacttcgaacagaagagtgaaatagttcctgaaaccgtgcgcctacaagcggtcggagctcgttaatgagtgacggcgtgccttttgcataatgaacctacgagttgcctttgccggcaaggttaagtgtgacgacacacgtatccgaagcgaaagcgagtctgaagagggcgtatagtcggcagtggcagacgcgaaaccaagtgatctacccttggccaggttgaaggctgggtaacaccagctggaggaccgcaccaataagcgttgaaaagcttctggatgagctgagggtaggggtgaaaggctaatcaaacttggagatagctcgtactccccgaaatgcatttaggtgcagccttgcgggttactgatgtgaggtagagcgactgataagatgcgagggcttcaccgcctatcaagtcttgacaaactccgaatgcgcatcagttctaccgcaggagtgagggcatgggtgctaaggtccgtgcccgagaggagaagaatccggaccacctgctaaggtcccgaaatgacagctaagttaaactaacgaagtctgactgctaagacagctaggatgttggcttggaagcagccattcatttaaagagtgcgtaacagctcactagtcgaggagtcgggcgtggataataatcgggtatgaagttgtctaccgaagcagtgggatcattaatatgatcggtaggggagcattccagtcggcgtcgaaggcgtaccgtgaggtattctggagcgtctggaaaagcaaatgtaggtataagtaacgataaagggggcgggaaaccccctcgccgaaagactaaggtttcctgatcaacgctaatcggatcagggtcagtcgggtcctaaggctcagccgaacggcgatgccgatggcagaaacggttaatattccgttactaccttcaggagtgacgtggagacgcagtagtgacagtgccgccatctgacggaatagatggttgaagggtgtaggagtcgatcatggcaggcaaatccaccatgagatccgaacctgacagtatgccgcgtccttcgggacaaggcaatagtgcgcgtaagcatgctgccgagaaaatccgctaaacttaatcctgcaggtacccgtaccgcaaacggacacacgtagtcgggatgaatattctaaggcgcttgagtgattcacggttaaggaactaggcaaactgaccctgtaacttcgggataaagggtccctacccttttatgggagggcgcagagaatcggtccaggcaactgtttaacaaaaacacagggctgtgccaaatcgaaagatccagtatacagcctgacacctgcccggtgctggaaggttaagaggagatgtcatcgataagagaagcgttgaattgaagccccagtaaacggcggccgtaactataacggtcctaaggtagcgaaattccttgtcgggtaagttccgacctgcacgaatggtgtaatgatctggacgctgtctcaaccgtgagctcagtgaaattgtagtatcggtgaagatgccgattacccgcgatgggacgaaaagaccccgtgaacctttactatagcttatcattgaatctgggcacgtgatgtgtaggataggtcggaggctttgaagcaggtacgccagtatttgtggagccgctgttgaaatacgaccctttatttgtttggattctaacccgtggaacggggacattgattggtgggtagtttgactggggtggtcgcctccaaaagcgtaacggaggcttctaaaggtgccctccggccgattggtaaccggccttagagtgtaatggcataagggcgcttgactgggagactgacaagtcgatcaggtaggaaactagagcatagtgatccggtgtttccgtatggaagggacatcgctcaaaggataaaaggtactccggggataacaggctgatccctcccaagagctcatatcgacggagtggtttggcacctcgatgtcggctcgtcacatcctggggctggagaaggtcccaagggttgggctgttcgcccattaaagtggcacgcgagctgggttcagaacgtcgtgagacagttcggtctctatctatcgtgggcgcatgaaatttgcgtggctctgacactagtacgagaggaccgtgttggacagacctctggtttgccggttgtgccgccaggtgcattgccgggtatctaagtctggatcggataagtgctgaaagcatctaagtacgaagccggccacaagattagatttctcagggtcgttgtagactacgacgttgataggatgcaggtgtaaagatggagacatcaaagccgagcattactaattgcccgtccactttccttatatgtcggatggtgtatacctttggtttttactacagaatgaaattacgataacagctcaacaatatgtcaaccttattcaggtggctatagcacaagggttccacctcttcccattccgaacagagaagttaagccttgtcacgccgatggtactgcgtcacagtgggagagtaggtagccgccgttttgattgaagcctccggacttgaagaagttccggaggctttttttgtatacgcacgcatgaaatgtggcctctaccgttttttcggctcagtttgaaaacttgggggaattagttaaaagccttatctttcccgtgggtgtggatacctttcccacggaactgtccggaaggctccgccatgtcttttctccggcaggggcaggtccggaagttttgctctgtaggggacgatgttcataaagtgagtttatttatgtcaattcaatttgcctctatatctaaagtgatctatatctttgcagatacacttctatagagatacttgtagatatatattcctataaactgttactctaaaagtagaataaataaaaaatcgtagtttatataatgaaaaaactttcatttttattttgcttttagaaaataatctctacctttgcaacgttttagataaaataagagataaacaatgaaccaaggatttatacatattttgctatgcggcattattattctactggcaaagtcagcgggaagtgagtgttgtgcataaaagtatgtgtgaacaatgatatacgaaagcctttctcacttccctgtgtgaaaggttttttttatgaatataataatggtaaaatataaaattgaaatttatgagtgacagattatttatttttgataccactcttcgtgatggcgaacaggttccgggatgtcagttgaatacagtggaaaagattcaggtggctaagcagttggaagctttgggagtggatgtgattgaggcaggatttcctatttcaagtccgggtgatttcaattcagtaattgaaatttctaaggctgttacttggccaaccatttgtgcgctgactcgtgcagttgaaaaagatatcgacgtagctgctgacgcattgaagtttgccaagcacaaacgtatccatactggcattggaacttcagattctcatatcaaatataaattcaattctactcgtgaagaaattattgaacgtgctgtggctgctgtgaaatatgcacgtcgttatgtagatgatgtggaattttatgcggaagatgcaggacgtacggataatgaatacttggctcgtgtggtagaagctgttattaaagcgggagcgacagtggtgaatatacctgatactacaggttattgcttgcctgaagagtatggggcgaaaattaaatatttggtagatcatgtagatggtatcgataaggctattatttctactcattgtcataatgatttgggtatggctactgccaatacgattagtggtgtgttaaatggagcacgtcaggtagaagtgactatcaatggcattggagaacgtgccggtaacacttccttggaagaggtggcaatgattgtcaaatgccataatgatattaatattcagacaaacatcaatacccagaagatttatccgactagtcgtatggtatcaagtttgatgaatatgccggttcagccgaacaaggcaattgtgggacgtaatgcttttgcacattcatccggtatccatcaagatggtgttttaaaaaacgtacaaacatacgaaattattgacccgaaggatgtgggcattgatgataatgctattgttttgactgctcgtagcggacgtgctgcgttaaaacatcgtcttcatgttttgggagtcgaactggaacaggacaaattggataaggtatatgaggatttcttaaaactggctgataagaagaaagatatcacggatgatgatattctggtattggcaggtgcagatagaagtgttaataaccatataaaattggattacttgcaggtaacaagcggagtgggcgttcgttcggtggcaagtttaggactgaatattgcaggagagcactttgaagctgctgccagtggaaatggaccggtagatgctgctatcaaggctttgaaaaaaattattgaccgccacatggtattgaaggaatttacgatccaggctatcagtaaaggtagtgatgatatgggtaaagtacacatgcaggtggaatatgacggacagatgtactatggtttcggagcgaatacagatattatcgctgcatcagtagaagcatatattgattgtatcaacaagtttaaaagataataatacgtaatacaaaaatggctaacacattatttgataagatttgggacgcccatgtggtacaaaaggttgaggagggacctactcaactttatatagacaggctttattgtcatgaagtaactagtccgcaggcttttgcgggactgcgcgcacgcggggtgaaagtctttcgtccggatcatgtatattgtatgccggatcacaatactccgacacatgaccaggataaaccgattgaggatccggtttctaaaacacaggtagatactttggcaaagaatgccaaagatttcggcttggctcatttcggtatgatggataaaagaaatggtattattcatgtagtaggtccggaaagagggctgactttgccggggatgacaattgtttgtggtgactcgcatacttctacccatggtgcgatgggagctgttgctttcggtattggaaccagtgaagtagaaatggtgttggcttcacaatgtatcttacaatctcgtccgaaaaccatgcgtatcactattgatggtgaactgggtaaaggagtgacggcgaaagacatggctctctatatgatgtctaagatgacaaccagtggtgctactggattcttcgtggaatatgccggttcggctgtccgtaacttgagtatggaaggtcgtctgactttatgtaatctgagtattgaaatgggggcacgtggtggcatggttgctcctgatgaagtgacttttgaatatataaaaggcagggaacatgctccgaaaggtgtggattgggataaagcggtgtctcattggaaaacattaaagagtgatgatgatgctgtatttgataaagaaattcgttttgatgcagcagatattcagccgatgattacatacggaacgaatccaggaatgggtatgggaatcactgagcatattccggtagatgataaaagtgcttcttttaaaaagtctttggactatatgggctttcagccgggcgaatccttgctaggtaagaaaattgattatgtatttttgggtgcttgcactaacggacgaattgaggacttccgcgcctttacctctttagtaagagggaaaaagaaagcagatcatgtgactgcatggctggttccgggatcatggatggtagatgcacagattcgtgaagaaggtttggacaaaatcttggaggaggcaggttttgccatccgtcaaccgggatgttctgcttgtctggctatgaatgatgataagattccggctggaaaatattcggtatctactagtaaccgtaattttgaaggacgccagggaccgggtgctcgcacgttgcttgccagtccgctggtagctgctgcggcggcggtgaccggtgtaataacagatcctagagaactaatttaaaaatgcgaagacaatgaaacagaaattcaatatcataacaagcacttgcgtaccccttcctttagagaatgtggacacagaccaaattattccggctcgtttcttaaaggcgacaactcgtgaagagaaattctttggtgataatctgttccgtgactggcgctacaatccggatggttctctgaacaaggattttgtattgaataatcctacttatggtggacaaatccttgtagcgggaaagaatttcggctctggttccagccgtgaacatgcagcatgggctatcgccggatatggtttccgggtagttgtgtccagtttctttgctgatattcataagaataatgaattaaataattttgtacttccggtggtggtgagtgaagaatttttgaaggaactttttgattcaattcatgcagatccgaaaatggaagtggaagtaaatctgcccgaacagactataaccaataaggctacaggtaaaagcgaacattttgaaattaatgcatacaagaaacattgtttgatgaacggattggatgatatcgactttttgctgaccaacaaagacaagatagaagcatgggaaaaagcgtcaaaatagaaatcatggatacaacactccgcgatggtgaacaaaccagcggagtatcttttgtgccccatgaaaaattgatgattgcccgattgctattggaagatttaaaggtagacagggtagaggttgcctcggcccgtgtatcggatggcgaatttgaagctgttaaaatgatatgtgactgggctgcccgccggaatttgcttcacaaagtggaggtgctcggatttgtggatggccgtacttctgtagattggatacaacgtacaggatgcagggtaattaacttattgtgtaaaggttcgttgaaacattgtacacagcagttgaagaaaacacctgaagaacatattgaagatattgtgaatgtggtgcgttatgccgatgaactggatattgcagttaatgtatatctggaagattggagtaacggaatgaaggattcttctgactatgtattccagttgatggacggattgaaggataccagcatcaagcgatatatgttaccggatacattgggtatcttgaatcctttgcaagtgattgaattcatgcggaagatgaaaaaacgttatcctcatactcattttgatttccatgcgcataatgattatgacttggctgtgagtaatgtacttgctgctgtgctgagtggggttaaaggacttcatactactatcaatggattaggggaacgtgcaggaaatgcaccgcttgccagtgttcaagctattctgaaggatcattttaatgctttgaccaatatcgacgaaagccgtctgaatgatgtgagccgagtggtggaatcctattctggtattgttattcctgccaacaagccgattgtgggtgagaatgtgtttacgcaagtggccggcgttcatgccgacggtgataataagaataatctttattgcaatgatttgttgccggaacgattcggacgtaaacgtgagtatgcgttgggcaagactagtggcaaagccaatatccgtaaaaatctggaggatttgggacttgatttagatgaagaatccatgcgtaaggtaacggaacgtattatcgaactgggtgacaagaaggaattggttactcaggaagatttgccttatattgtttccgatgtgctgaagcatggagtggtaagcgaaagtgtaaaactgaaaagttatattgtgacactggcgcatggattgaagccgatggctactgtaaaaatagagattaacggaaaagagtttgaggagaattccagcggtgacggtcagtatgacgcttttgtgcgtgcattgcgtaaaatttataaagtgacgttagggcgtaaattccctatgttgaccaattatgcggtaagtattcctcctgggggccgtacagatgcatttgtgcaaacagtaataacttggagttttgaagaaaaagtattccgtactcgtgggctggatgctgaccagacggaggctgctatcaaggctaccatgaaaatgctgaatataatagaaaatgaatatgaaaataataatggttagtgattagtggttagtggttaatgaacagtgtcgtcagatttcattaaccgccaactattaatcactgaccgctaaccattaatcactaaaaaaatggattttaaaattgcagttttagccggtgacggtatcggaccggagatttcagtgcaaggcgttgatgtgatgaacgctgtttgtgagaagtttggccataaagtaagttatgaatacgcgatctgtggtgcagatgcgatagataaagtaggtgatccgtttcccgaagctacttttcaggcttgtaagaatgccgatgcagtgcttttctcggctgtaggcgaccctaaatttgataatgatcctacagcaaaggttcgtccggagcaaggtttgctggctatgcgtaaaaaattaggtttgtttgccaatatccgtcctgtgcagactttcaaatgcttggttcataagtctccgttgcgcgccgaattggtggaaaatgccgattttatctgtattcgtgaactgaccggagggatgtacttcggtgaaaaatatcaggataatgataaggcatatgataccaatatgtatacccgtccggagattgagcgtattttaaaagtggcttttgaatatgccatgaagcgccgtaagcatcttactgtagttgataaggcaaatgtgctggcatcttcacgtctgtggaggcagattgcacaagagatggctcctcagtatccggaagtgactacagactatatgtttgtggataatgctgccatgaagatgcttcaggatccttgtttctttgacgtgatggtgactgagaatacatttggtgatattctgacagatgaaggctctgttatcagtggctctatgggattacttccttctgcttctacgggtgaaagcactccggtattcgaacctattcacggttcatggccacaggctaaaggattgaatattgccaatccattggctcaaatcctatcggtggccatgctgtttgagtattttgatcttaaggaggaaggcaccttgattcgtaaggctgtagatgcttctttggatgaaaatgtgcgtactccggaaattcaggttgaaggtggggccaagtatggtactaaggaagtgggttcctggattgtggattatatcaagaaagcatagaattttataggttttttacggagaatcagaagtgaatgccattttacttctgattctttatttttattggataagaaaaagtatatttgatgctgcaaataaaacaaagataataattgaaagacattcagatgaagaatttagtttatgctttggtaggagctggttttatgattgcctgccagccttcggaccaaccggaaatcagcggtatgctgactggtatcgagagtgatacattattggtacaatcttttcctgtaaatgatcgtgatagtcgtaggacagatacgattgccatgcaaaatggaagttttgcttttaatttaggtgatagtgtattgaaacaggtttatatttatggtaaaccgtcagtgaaacccaatgaggatggcagtatacctgccatatcgatgaaagctgtaaattttttgctgttgcctggccaacctataaaaatttcaggttcattggatgaatataaattggagggaggttccttttatgatgattataatgaagtgttggaggactgtaaagcatatagtcataaaatagattcattgaatgtagtctgtatggatatggagaaaaaaggaatacccggagattctatccgtaaagtttatgcttcagcaaaagaatggtatggaaatattttaaaaataaaaagtgactatgttaggcagaatccggataaagatgtatcagtatatgtaatgtcacagttgacaagggaccagttgggggatgcttttaatgttttgactgaccgggtaaaggaaggaatgatggctcctttatatcagagaatgagagaaggatatgagaaagaactggctcgcgataaagcaaaagaagcaatgaaaccaggtaatcctgctccggaatttactttgaaggatttggatggaaagaattttgacttatcttctctgagaggtaaatatgtagtgcttgatttctggggaagctggtgtggatggtgcataaaaggaattcccgaaatgaaaaaggcatatgaaaaatacaagggaaaaatagaatttgtagggattgactgcaatgatacagaggataaatggaaaaaagcagtagctgagcatcaattgccgtggattaatgtacgcaatataggtgaaccggatgtggcggtgatgtatggagtaagtggttatcccactaaatatgtgattgatcctgaagggaaaattgctaaacaggtagttggcgagaatcccgaattttatatgtatctggacgcattgatgaaatgatgaaaggttccggataattatgaataacagaggtgtgccattatttgaacacacctctgttgtttaatttagaatttttttacgcgtatatgacagtaaggttctcctcccgttttatcgtaatagtgctgatgatagtcttctgcttcccaaaatttctcggcagggcgtaatttggtattgactctatgacctttcgagcgaagcagttcgatgacctcttcagcttcggatttttgtttttcatccatgtagaaaatcatactccgatattgcggtccgaggtcgggacctattccatcggtttgtgaaggatcatgtatttcaaaaaaaagtttgcacaaatccacataagaaaccatgtcggcgtcataatctacaaaaatagcttctacatggtgggtcatgtgggcttttacctgagtatatgtggggttggcttccggaccacctgtataaccgactgtagtgtttagtacacccggaatacgttcgaactgatgttgtacgccccagaagcatccggcggcgaatatcgctttttctactttcatgttctttattcttttaaaattgtatgccaaatatacggaataccctttaaaacgagaaacctaccttatgctttttttaattaaactaaaggaatatcgttaaagattcctctacctttgcaaccggaattaattaatatagaaaatcggatgaaacagatcgtatgttatcttatgttgctatgtgcatgtatgcagttgcaggcgcaaacttacgatgagctgataacctgtgcgttggatgcggcaaaaaacgacagtttgacaaaatcagaaattttgttcaaacaggcattgaagatggatcctgccaatatgcgtaatgctttattgtttactaatctaggaacggtccagcggagattggggaaaatagatgatgctattgattcgtacacgttatccttgaatattactccatattctgttgttacattgctcaatcgtgcttcactctatttggagaaaaatttgtttgacagggcttatgtggattattgcaatgtgattgatatagataagacaaataaggaagcgttacttttccgggcttatatttatatgcaacgtagggattataagggagcgagaatagattataatactttattacaggaggaaccggggaataatactgcacgtttgggcagggcacttttaaatcagaaggagttgaagtatcgtgaatctttagaagattttaacaaattggtttccgataatcccagagatgtttcttatttgaaagctcgcgctacattggctgtagaaatgaatacgcctgatttggctttattggatttggaggaggccgccaaactggcaccggacgatgcggaaatttatgtgatgtgtggtgagatttatttaagtcagaagaaaaaaagagaagcgtatgttgcttttgaaaaagcaatagagttgggagttccccgaccggaattacaggataagctgaaagcaagtaagtaaaaatacgaacaggattattgtcagacaatcatcatgcttttacaagaggctgtctcaaaatagagttgagatggcctcttttgtttcatctccaattgaagtcatttggatttttctcaaaaaaggagtttataaacttacttttgaaggtttcatcctttcaaactttttttttcgttgccataagccccctaagaggctacttttgcaagattatgtgcaatggccagcaggccgaactcaatttcaaccttcttaagcccacgaagatggaacctcttgaagtgcttgttgttcttgaggtttccaaatacggcttccacatcctgcggtcgctggctgcgatatttcaggccttcatcagagagcagtttttcacgttccctttccttgattttcctcagacgatggtttacctgcacaattctttccgaccggcttctgtgacaccggcatcttagcgggcagcctttgcagttacgtgccctgtatcttgagatggtctgcacaaaaccgttgtctgttatccgccttgcatcggagagtctttccattctctgtcccatcggacagtacatgccgtcggtttcttcattataataaaagttggcagagagaaacgggtcgttccggaagttccttttctgttccttatgaaaattgttgtactttataaaggtttcaatgccatgtctgaaggcgtacagatagttctcctcgcttccgtatccggcatcacagacagatacgtcagggtatctgccgtaaagggaatggaaattatccatatgcaggggataggtggaggtatcaccggcacactgatggatggtatagttcagaatgaactgtctgttggtactgatctggggattatatccgggtttgagctgtccgttcctcatgtggtcctctttcatgcgcatgaaagtagcgtcattgtctgtctttgagtagctgttgcgtccgtcaagtatctttccctgtgattcatatttcctgagctgttcgggccatgacttccttacacgtcttaccttcgctttcattttcctgtctgcatccactccgttcagggcatcatctatctggcaaagtgccttttccactttctccggagtgatatcctgatatgtgatgggtgcggaatcacgcagttcctgcttggtgacggactcggcgtactgccatatctcttcaagctgttccgcgattctggatatacgcgtatgtatggacttaccccagacgaacgtataacggttggcatccgcctccatcttcgtcccgtcggtacaggccacatccagacttacaaaaccttccgccacaaggaactttacgatggtggcaaatattgtcttgagtacatccttcagccggctgctgcggaaacggttgatggtattatggtcaggagtcacattgccggtaagccacatgaagcggatgtcattgcgacagaattcttctatgcgacggctggaatagatattacgcagataagcatagaccagaatctgaagcatcatgcgagggtggtatgcagaacagccttggggagaatacctgcggtaaagtttttcaaggtttatctgttcaatgatacggtgaacaacccggaccggatcgttctggggaataaaatcgcctaaacacggaggtaaaagcagattatcgttggatgtataacttttaaacattatctttgggatatcttgacttgattccctaagatacaaaaaattagggagacgggcaagttctgactgagcgaagttaggacttgcccgatttttttgcaaacacaaaaaaaggccgtctcattttgagacagcctcttgttggtatatgggaagaatagtttttcatttcttcagtaccttctttatcaactctataaactcttttccgtatttttctttcttatattcgccaataccattgatgttgccgaatgcttctattgttgtaggttgttgggtggcgatcaggtgcaaagtcttgtcggataaaacaatataggcaggtatagcttgctggtccgccagctttttacgcagtatacgtaactcctcgaacaagtccttgttttcattaccaaaagtaaccggagtgggaaagagtacctcttccttggctttctttttgcgtttttccttagcaggtacgaattcttcccgtttaatgactaccagcatggcggattctttgccgaacaatactttttgcccgctttcagttattttgaggtgattgttctcattataggctatttcgaaatatcctagattcagcatttgcagcagataatcttgccagtcgcgtgcgggaatatctcttcctgcggcatatgttttcagtttgtcataacctttgtcaatcagttcttggtttgctgaccctttcaatatgtctattaacatgtgagtacctatttgttggttagttcgggctattgcactcaaagctttttgtacaatgattgttccgtcaaagcgttcggggggattacggcacacatcacagttgccacaatcatggtccatggtttcaccaaaatagttcagcaggatacgcctccgacagatatccgattcagcatattgttgcatccggtgtaatttctctaagttaatttcctgctggctgctttctgtagcgaatttggaaagcataaccaagtctcccagtgaatagaacagcaaagtatcactttccataccatcacgcccggcacgtcctatttcttgatagaaactttctatgcttttaggaaggttataatgaataacccagcgtacattggatttatcaattcccatcccgaaagcaatagtggcgcacaccacctgtacacgatcatttatgaaatcattttgtgccttatcacgcatatcgctgcttaatcctgcatgataaacggttgcacggataccttgtttcatcagcattgcggccacattttctgttttgctgcggctcatgcaataaatgataccacattcatttttgtgtttttctatgaattcaagaatagtccgcatcttatccttttgttggtagcctcttttaacttccaaactcagattgggccgatcaaaggaagatatgaatattttaggatctttcaaggccaattgttgtacaatgtcttttcgggttattttgtcagctgtagcagtcaatgctacaatcggtactttgggaaactgattacgtaatacctttaattgggtatattcaggccggaaatcatgtccccattgtgagatgcaatgagcttcatcaatggcaaataaagaaatttgaatatctttcagcaggaagtttgtttctataagtaatcgttcaggtgaaatataaagcaatttgatttttccttgaagacattcgcgacgtagatttatattttctgtttcattattgctgctgttcagtgcccgtgctgcaattccgtttgcttgtaaactttccacctggtctttcattaaagaaataaggggtgaaacgacaatggccgtaccttccatcagtaaagccggtaattgataacagatggattttcctcctcctgtaggcattaataccaaagtatccttttgagctaatatattttgaataatatcttgctgtaaaggacggaaactatcgtatccaaagtagttttttagagtttggaacatatctgtttgttattttaaaatgtaatcggttacaaaggtagtaaaatctttagatttggtaggaatctctgcctaataatagtaaataagatatacttttattcataattcatttgttttgaaattattgcttaaaagagaggttggttattgtagattggacaaataaacttttttgccacttaaaaaacaaagtgttgtgattatttaagaaataaattaagcaaaaaaagttgcatatgaaaaaaacttttcccacatttgtccaaaattagatatttgcatttatataactaaccaaacaacgaaaaattaaaagaaaaattaactgatgagcgacgtggaaaaaaaatcagaaacccaggaagcggctcctaagaaaaaaccgtataacctgagagaaaagaaagagaaaaaggctgcttacagatctctgattagagcagaacttgccgatgaattgtatgataagattttgaacattgtagttgttcagaaaaagtacaaagaccctaattattcagcaaaagacttggcgaaagaattaaagacaaatactcgttatttgtcagctgtagtgaattcccgcttcggaatgaattattcttgtttgttgaatgaatatcgtattaaagatgctttgcatcttttagttgataaacgctatatggataagaatgtggaagagatcagtgcaatggtaggttttgctaatcgccaatctttttatgctgcgttttataagaatgtgggtgagactcctaatggctatcgtaagagaaatcaagaaaagaaataagagcataatttgctacattataattaagaaaaaggaaaacaattgttttcctttttttgtttcggctcacgaattatgtatctataaaaaacgttaattgtagaaatgaaacaggttggttgcaatgaagtagataaaagcatgaatgaaatggaggaatttgattatacggttgaacaatttgccgacttacagttacttcgatataaagtgtatggatttgaagaactgagtttgaaacaaaaaaagttgatttactatttgtcacaagctgctttgcaaggccgtgatattttgtttgatcagaatggcaaatacaatttgcttattcgtaaaatgttggaaaccgtatatacagagtatcagggagatcgtacagatgtgaatttcgtcaatttggaaacttatctgaaacgcatatggttttctaacggaattcatcatcattatgcttcaaataagttcgtaccaggtttcactccggaattttttagggatgcattgaatagtgtggatgcattgaagttacctttgggtaaaggggaaacagtggaagaactttgtgaagaagtctttccggtgatttttgattctgaaatgatgcctaaacgtgtgaatcaggcagacggggaggatttggtcctgacttcggctgcaaattattacgaaggggtaacccagaaagaagcggaagatttttatcataatttgaagaatccggatgatatgatgccggtaatgtttggtatgaacagccgtttagtaaaggaggacggaaaagtacaagaaaaggtctggagatctggaggattgtatgggcaagccattgataagatcatttattggttggataaggctcttggtgtggcagaagatgcacaacaaaaaatagttatcgaaaaattaattcgattttataagaatggggacttgaaagattttgatgaatattctattgcgtgggtgaaggatttggattcacgcgtggattttgttaacggctttattgaaagttatggagatccgttaggactgaaagctagttgggagtccattgtgaattttaaagatctggaagcaaccaagcgcacggaaatcatcagcgctaatgctcaatggtttgaagatcactcacctgtagatcatcggtttaaaaaaaaggaagtgaaaggtgtgtcggccaaggtgattacagccgctatgctggggggggatttgtatcctgctacagcgattgggattaatctccctaattccaactggattcgtagtgtgcatggttctaagtctgtaaccatcggaaatctgactgaagcctataataaagcggctcatggtaatggatttacagatgaatttgtttgcggtgccgaagagaaagaatggataaagaaatatgcagatcttacaggggatttacatactgatttgcatgaatgtttggggcacggttctggtcagttgttaccgggagtagatcaggatgctttgaaagcgtatggatctacgatagaagaggcacgtgccgatttattcggtttgtactatctgccggatgacaaaatggtagagttggggcttacaccggatggagatgcctttaaagcagaatattatacttatatgatgaatggtctgatgacccagttagtccgcatcgagttaggtaatatggtagaggaagcacacatgcgtaaccgccagctcattgcgcggtggacatttgagaaaggtgctgcagataaggtggttgaactggttaagaaggatgggaaaacgtatgtgaagataaacgattatcaaaaattgcgcactctgttcggacagttgctggctgagatacaacgcattaaaagtgaaggagattttgaggctgcccgtaaattggtcgaaaagtatgcggtgaaaatagatccggttttgcacgccgagatattggcacgttatgaaaaacttcatctggctccttacaaaggttttgtaaatcctgtatatgaggccgtgacagataaggatggaaatattatagatgtaaaagtatcttataatgaaggttacgcggagcaaatgttacgttatagcaaagaatttgcgaatcttccttatagaaatgaataagaataaatatggatgtacacgaaacaataaaggacataaaggggcaattccgtttgtttatgaatggggtggtttcccaaagtatgcgtgagaagggattagactataaactgaattttggcatcgaacttccgcgtttgaaagaaatagctgctcgttatgaaaaaaatcatgaagtggcgcaagctttatggaaagaaaatatccgtgaatgtaaaattctggcgggaatgttacagccggtagaaacattttatccggaaatagctgatatatgggtagaagatatgcgctatcctgaaatagcggaactgacttgcatgagtttgttccaatatttaccttatgcttcggagaaggcttttgaatggatggccgatgagcgtgaatattttcagttatgtggctttatgctgatggcaaggctgttgatgaagggaaatcagctgactgagcgttcggaagctgaatttttggatcaggcaatggtcactttacaaagcgagggagtgctgccccgcaaagcagctgctactgctttgaagaagtttgccgttcaaagcaaggaaaatggcaaaaaggtgaatcggttgttggctccattaaccaaatcagataaggtagaaatagcttctttggctggagaaataaaattagaaacagaatattggcattaaactttcatgttatcataaaaaggcttaactttgacggcggaactgaaatctgtgatggaagagaatgtgaaagataaggtaaagcagatcttgacagaatatctgcaggttaacgggcatcggaagacacctgaacgatatgctatactcgatactatctattccattaaaggtcattttgacattgatacgctttataattatatggcaaatgaaggaaaattccgggtaagccgggctactctttataataccatcattctttttatcgatgcaaaattggttattaaacatcagttcggcaattcttcccagtacgagcgtgcgtacaacaatgaaacccatcatcacatgatatgtacggaatgtggcaaagtgaccgaatttcaggatgagaatctgaaacaagccattgccaatacgaaactgaagaaatttcatgcctcgcactattccttatatatctatggtgtatgcagcaagtgtacttgggccaagcgtaggaagaaaaaagataagtaacataaaacgaagaaacatgaaagtagatgtcttgttaggtttgcaatggggtgatgaaggcaaaggaaaggttgtcgatgttctgactccccgttatgatgtggtagctcgtttccagggaggtccgaatgcaggtcatacactggaattcgaaggccagaaatatgtgctccgttccattccttccggaatatttcaaggaaataaagtaaacattattggtaatggtgtggtactggatccggctttgttcaaggctgaggctgaagctttggaggctagcggacaccccctgaaagaacgtttgcacatttcaaagaaagctcatttgattttgcctactcaccgcattctggatgctgcttatgaagctgctaaaggagatgccaaagtgggaactaccggaaaaggtataggtcctacttatactgataaagtgagtcgtaacggtgtacgtgtaggtgatatccttcataattttgaagaagtgtatggaaaggcaaaggcacgtcacgaacagatcttgaaaagtctgaattatgaatatgatataaccgaactggaaaaacaatggttggagggtatcgaatacctgaaacagttccatttggtggacagtgaacacgaaataaacaatcttctgaagtcgggtaagagtgtgctttgtgaaggtgcgcagggaacgatgcttgatgttgatttcggttcttatccttttgtcacttcttcaaataccatttgtgccggtgcttgtaccggtttaggtatcggtcctaataaaattggtaatgtatacggtatcatgaaagcgtattgtacccgtgtgggggcaggtcctttccctaccgaattgtttgatgaaactggtaagaaaatccgcgatttaggtcatgaatatggtgcggtgacaggtcgtgaacgtcgttgtggctggattgatcttgtagctttgaagtattctatcatggtaaacggggtgactcagttaattatgatgaagagcgatgtgttggatgatttcgaaaccatcaaagcatgtgtggcttataaagtaaatggtgaggaaattgattacttcccttatgatattagtgaggggctggaacctgtatatgcggagctgcccggatggaagactgatatgaccaagatgaccagtgaggatgaattcccggaagaattcaatgcgtatgtcactttcttggaagaacagctggaaaccccgatcaagattgtttcggtaggtcctgatcgtggtcagactattgaacgctatacggaagaataatagagaagaatcttataagataaaaaagagatactgttttcctttggagtcagtttctcttttttttgtatacatctatctgtttctatgtatatttgataaaattgtaacatctataatgatacccatgtaagataatatatctttcgtctttatcgtatatctttccggttactattttaagatgtgtgtggagcatcaattgtgcattattgcgtattattgtgccaaatcgcgtcattccgtctgggtttctttctatatttgtcatcaataaaaatatcgatatggcattacaaacaaccggattggaatttttctacttgagtgtggatttctccgagaatgataaaatattgttggtggaacaagagttgggctacattgcttgtattgcatttattggtacgtatttaccacaaaggatgtctttgctgttggagagaggataggtgtctgctttttactcgcagattgtccgaaggatgtacggccgattatgtacagcaagtagtggatgcactgttggaacgtggattttttagtaaagcccaatacgaaaaaaatggaattcttacttcggaaagtatacaggaccattactttgaggcggtacaacaacggaagtgtgtagaggtgagtactgattacttgttgatagagatttcaaaatacaagaatttgtatgtggatggtagtaacgtaggcatttcaacggaaaatgtggacatgaaaacatgaagttacaaagtaaagcagagcaaaaaaagaaaaggactcctcttcattttgttctccagaaaagaagaggatttttgcggagaaagagactttttcttctattcctgtagatggaaaatgcagaaatgcttccggaccagttgaagctttgcagcagtgagggataggagataagatagtagggtactgtgattatggtgtgatagggcatccgatatggcaaatattagctgatatgcgtatgtcaggtggaaggttatatcaattgttagcctttattggggcgcgcctgcgagtttgaccgattagaatttagtagattgataaatactgtaattgtgtaataaagaaaacgattgatcgttttatggttcatataagtagaaaataaatagaatattaaatagataatagcctgatttttagagtgctgattatgctaatggtagagtataagtagaaagtgactaaaaaaaatattcataatatattgtgtatcaagtaaaagggggaaataatataagtatggtggacttaatgaatagaggagaacggtaagcataagttcttttggaactcattttatcaataatattgcaaagatataaaattttattaaaaataaaagaataagtctattattttttgtctatgatatttttttattcataagtattgtttagttgtgatatttgttagatgtaaggtagttattttatttttagtataaaatgatgtgaaatacatgaaaattgtcaagataatcattttcttcttcagatatcttgttccaaataaagtaccttgttttttatttctttaactatttatcctttgtgtgaaattactcttttaacagttgaatattgtttggaacgactaatatttaggcgttttttataagaaatgaattcttgtactttcctcttttatagaactaagttccaaaagaacttggataatgtttaattaaaagagagtgagtatgaaagaaaaagtgttagtgttactagcttgtctgtggttgggtatcggcttctctatggctcaagcgcctaaaacagttgcaggagttgtaacttctgcggatgatggtgagccgataataggtgcgtctgttttagtagaagggactactatgggagcaattacggatgtagatggcaagtttgctatcaataatgttcctacagatgccaaagcgctgattgtttcttatctgggtatgattactcagcgagttggaattcagcgtggtactattactgtaacaatgaagtcggacacaaaagtgttggatgaagtggttgtaactgctcaaggattgaaccgtaaacaaaaagcgttgggttattctacacaaaaggtggcaggtgaggatctaactatttcacgacagaccgatttgggtaatgctatggccggtaaagtgtcgggagcacgttttataggtggtgccagttctggttttgatgcaggtactattattttgcgtggtgcaggttccattccttcttcgtcccagtcggataatccggccaatgagcctatttatgtggtagatggtgctatcaccaacaaaaactctatcaatatggatgatgtggaaagcataaacgtattgaaaggtcccgcggctactgccctttatggttcgcgtggtggtgcaggtgctatcatcataactactaaggcgggacaaagtgagaaagggttgcttgaagtaagtcatacattgcaggccgaaacttactataatcatttcaatatgcagaagctgtatggtggtggaggatatggaggtacggaaaaaggtaacagggctcaggatatttatgatttgtatagtggtgatattcccggtttgcaaggtgcttatgtgtacgattataatgaggacacttcttggggagctgcatacgatccggctgtgaaatatgtcactccgttgtcattagacgaaaccagtggtcattatggaaaaccagccacttggcaacatggattggatttgagagatctttatcggactggtgtaaccaatacaaccaacgtttcgttttcaaagagtgtgaaagattttaatacccgtgtttctttcaccaatagctatcgtactggtgtgcagcccaattcggatgctattcgccgtttcttagggttcaagacaaatttcaaacccacaccgtggatgaatgtgtcattggattataaatatacttatcgtcaggatcataatgctgccgaaagtggatataacggttcacgtaccgttttgcaggaatatacccaatggggacagaccaatgtcaatttaaaagattataaggactataaacgtccggacggatcatggaggacgtggaatatcaacagtgtgaataatcaaagtgctgcattccatgataatccgtatgctttatttcatgaatataatcatcgcaccatttatcaatggaatgtattcagtggtgatgtgtctgtggaccttccttataacttgaaggcaggggtacgcgtaaatggtaacatacgtggttacaaattggaacgagaacgcccttcaggatctattaatttccggtcaaattatcgtcaggatcaaagcagtttgattgatttgaccgtacaaggacgtttaacttggggacaatcattttttaaagataaactaacggtagacgcagctctttttgcagaagcacgtgactatacgtacgataatttatatgcatacaccaatacgaattatgatttgtctttggacgattactataatttggctgcttcatcgggtactattgctttagcctataatgagaaaacacattacaaagaacgtagtgtttatgccacagctaccatgggctgggatgatacttattttcttgacgcttctgttcgtaacgatatgtcttccacattgagtcctaatcataacagctattggtatggtggcctttccgcttctgtccttgctcacaaatgggtgaatgcagaatggctgaacttttggaaactgcgtgctagtgcggctcaagtaggtactacgctcaatgcttacaatatttatcctacttattcgctggataccagttatggttcacatgttacaatgtatgaaccttcttctcagaaaaattataatatcgagccgtctatttccacttcgtatgaaataggtacggaattccgtttgttcaataatcgtttatggggtgatttcaactattatacccgggatgacaaagatcagataatctccgtaacctctgctccgcaatcggggtattccactcgtaagatgaatgctggtttaattcgtaatcggggtgttgaattgagtttgggcgggatgcctgtttccactaagaactggaaatgggaaatgaatttcaatatagcgaagaatagtaataaactggtggaactagctgatggagtggattcttattctatttattggacttcattcacaactcgtttgtataattatgctatggttggtaaatcacttggtgtgataaccggtaatacatgggaacgtgatgacaatggcaatataatcttccatgaattgagtgcttcgcagaaggcgttgtatggtggtgaatatgtacctacttacaatcagaatacactagatgaactgggtaacttccatccggatttcactggtggttttaatactagtatcagttttaagaatttccgtctgtcggctaatattgatttctctgtaggcggacagattgtatcctatactaatatgtggggtagcaatagcggtattcttgataaaacagctgagcttaatgaccgtggcgtcaatgttcgtgaaccggtaagcaaaggtggtggtatccacatgactggtgtggatcagaatggcaataaggtagatacctatgtcaatgctaaactatattataccacagcttcccgtgtatgggaagaatgggtgtatgaccgtacttacgtgaaacttcgtgaagtgtcattgtcgtatgttttcccgtcacagactttgaagaaactaaatatcggcctgagtcgtgccagtgtggcaattaatgcttccaatccatggttgatctactcagcttgtcctaatgtggatgtgtctgaaattggtatgggatattttgagggtggtaatgccgctgcaacccgttcgataggttttaccgttaatcttgctttttaaaccataaaatgaagaatcattatgaaatatattaaattattatttttatctctgagttttgcagcaacattcacagcatgtgatatgactgactttggcgatattaacaaagatcccaatgaaccgtcggaggctaatactggtatgttgtttacatacgcttgtacttatgtgaaatacttctctatgaactcaaattattattacccgtggacgcaaatgtatccggggtatatgtccgagaaaaataataatcagtatggtgcgtttggcggacctactatgagtacaagttcttattatctttatccgttgaagaactgccagaagattattgactttaatagtgatgagactgaaaaaggtaaacctgccattgtgcagtttggtgataatgccaatcagattgcggttgcacgtacattgatgggattcatctatatgcaccttacagatgctctagggccacttccttacacagaagcatttcaggcaggtgaggaaaattttactccggtatttgattcacaggaaactatttatgctaagttagatgccgatttgagggaagcgtataatcagtttaatgaaagtggctcgttgagcacagccgacatcctgttcgatggtgacattcgtgcatggaagaaactgaatgcttctacccgtatgatgcttgctataaaactggcagatgtggatcctgccgaaggacgctcgcgttttgctcaagcttacgctgatggcggtattgaagaaaatgcctataatttgaattatacttttgaggccaatactgtgggatatttatattataatggcgtaaactataattataattttgttcctaataagtattatgtagatcagttgaaggaattgaaggacaaccgtctgttctctacttgttcgctgattccttttggcaagacacaggcagagacaggcgtgacagatgaagacctgaagaattttgataaataccaaggtatgcctttgggtattgagtctgcagatgtgaacacgtggaataaagtctgctgtttttataatccttcgcttacacaggtaacctctactttccctattattactgcttctcgtatgctacttatcgaggctgaagctgctcaacgtggctggattcaggctgatcctgcccaactttatgcagccggtgtgaaggcatcatttgaacaatggggagccgaaggtgttgatgaatatttggtacaggaagcagttgcttatacgggtactgatgctgataaaattaataaaattgctcttcagcgctggatcagtggcttcatggctgatggttttgaggcatggtctgactggcgtcgttttgatattccgaaactagaagtcggtccggtttgtacaacgattgatcacatcccttatcgccatcaatttgatagcgaaatttatcaaggtaatcttgaaaattatgaagctgccgtgaaagcagatttgaatggtgatgatagccgtgagcaacgagtatggtggaatagaagataagatttgaagtatataattctctttaaagtttcgtttaaatataggggacattctcagtgatgagagtgtcttcttttattgaaataaatcaaaaaatatataggataaacgttagttaagactaggtaattcataaattgcctcgatggatagatatacgtattgctttttcttattcacttttgttgtgtttggttgggtggcatttgaagaatgttattgttgggatattgaatttttatgaagaaattctcctgttttaaagcataaaaaaaggctatctatcccagacagccaatcttttgttaaccttaaatctaatactatgaaaaacacattgcaaagatacggactttgtttataatagcaagtttttagtctgtatttcgccgttttataacatgctttataaatatatcgcaccttgttaacaaattaatttaaaaatgtaaagttttgtttattatgacctttcggactttttgtcttatgaatgatagaagagggcaaatgaaaataaaagtatgtgatagctgtttttctatttcttattttatatctttgatgtcactttactgattgaaaaaataacagttacttatgaaaaacagacagtttattgtatttgcttttttattagcatgtccgttgctgttacacggacaggaaacgtttctttgtggaaaagaatcatgtaataaaggttatatccggcatccatggtatggaaaaaaggttggttatataggagactcgataactgatcccaattgttatggagataacataaaaaagtattgggattttttgaaagaatggttggatatcactccttatgtgtatggagtgagtggacgtcaatggaatgatgtaccccgtcaggcagaacaattgaaaaaggagcatggagaagaggttgatgccatcgtggttttgatggggacaaatgattttaatagcagtgtacctgtcgggacttggtttgcagagaaagaagagcaggtgatggctgcccgtggtgaaactaaaaaactggaaacgcgtaaaaggcgtgttcctataatgacgaatgatacgtataaaggccgtattaatattggtttgagtcatttgaaaaaattgtttcccgataaacaaattgttttgttgaccccattgcatcgttctttagcggaattcggcgaaaagaatgtacaaccggatgaaagctatcagaataaatgcggagaatatgtggacgcttatgtacaggccattaaggaagcaggtaatttgtggggagttcctgtaatagattttaattcggttacaggtatgaatccgatgattgaagaacaacttatttatttctatgattcggggtatgatcgtttgcatcctaataccaatggtcaagaacgtatggcacatacattgatgtatcagttactttctttgcctgcatcattctgacagttggacattcatattttgcctttttggaagagtttgtctattggggagaaccttcgatgtttcgatatgaatttgaagaattgaaaaaatgttcaagtggcaaattgatgttgtttgaacatctttttattagttcttatttactgaaagagtaattgaactattgattttgagcaaatttctatattcttgtatcattttttatggtttcttttcttgtttacttttgcctaaatcttttaacttataaaatgtatatgaaaaacatgaaattaaaagtattacttgttttatgtgctttactcctgttatcggcttttattgctgagagaaaagagcccattactatttttatgattggtgattctaccatggcgaataaaagtctgaagaatggtaatatagagcgtggttggggacaaatgcttctcggatattttacggaagataatcacgctatgaatggatgaagttcactcagttttatcaatgaaggacgttgggatgtagtgctttctaaaattcataaaggtgattatgtatttattcaattcgggcataatgatgagaaatctagagtcacattacatacagaatccggaagtacctttgatgataatttaagacgttttgtgaatggaacatgtgctaagggaggaaatcctgtactgttcaattctatagttcgtcgtaatttccccccccctaaaggtgtgacggagataaagggtagttatgaaaaagaaggtccggtattggttgatacccatgggaaatatctggaatctccccgtcgggtagccggagaaatgaatgtatcttttattgatttgaataaattgatccatgacttggttaccggtatgggagtcgagaattcaagaaaattgtttatgtggattccttccggacaatatgaattttgtccggaagggaaaattgacaatactcacttgaatatatatatggtggacgtctagttgccgggttggttgtggacgctttgatggaagaagtgccggctttggcaaaatatgtgcgacgttatgattatgtggtggcgaaagatgggagtggggatttctttacagttcaggaagcagtgaatgcggcagttggtggtggcaagaaaacaatatctatacttgtccgtccgggagtatatgaagagtatgtttctatgccggaatcatcgcctcgaatagaattggtgaaacagacaggggctgagatcagggataacgggttcacacaagatgtttatgtggcaccttataagggtgacagagtgtgtgctatcagttatcatttgataagaacagggtaggtacatgtaccgaacaatatcccatcgggggagataagtcgaaatcgactcctgcgtctttagataaatgggtggaaagcttggtaaactctggtagatggggagttggcaatgatacatggaatatcgcagggatatgatgcttttcaaaatcctaaaatattgtgggaataaggtaaaggctatggaaaatgaaatatgggtgggtacatttagagaggtagttgcctatacaaaagaacgagaaaaaaatcgcttgaatgtgctagaaaatggctatgacataactcctcatttgatatgaatgcacaattatttacagaaccactgactatggtattaaaatctgtgggaaacagagtttaggagattaggcaagatgggaaaaagctttttctaaagaaggatgctgataaggttcttttcgattttaatccttatggagggatgattcagattcgttttatctgaggtgttggatatagttttaaaactagaatagggaaatccgttagtctttattgtaaccatttaaggtgtgataataagattaacggatttgttttttgctcttttataaagttactcagaattaatttctaaatttgttcccgttaactttattcctttttcaaaagaaataaaatggaaaacacagagaaactgattgtagaacaactgaaaaatggcaacgaagatgcttataaatacatctatgattatcattatgttcttttatgtcatgtagcaaatcaatatttgaacgataattttttatcggaaactatagttggagatgtaatatttcacctttgggagatcagagaaactttaaacattactatttctattagaagttatctgataaaggctgttcgtaatcgttgtatagactatctgaaatctagatctgaaaaaaaggaaatttcattttcagttttagtaccggaagagatgtctgaagaaaagtatttgcagtcggataattatcctttgggaatattattagaacgtgaattggagcatgaaatccgtatggcaatagataaactaccggttgaatgtagatgtgtttttgaaaaaagtagatttgaggagaaaaaatatgaagaaatttctcaggaattaggtatttctataaatacggttaagtatcatataaagaatgcattatctttccttcagactgaattgagcaaatatttaattgctttgattttatttttttcgtgttaaaacagaaaaaagttcttttaggactaccctgtatttaaaataaatcgtcttcactttagaaacaacaaagatgaaagcagaaaaagaacatattgatgaattaatagtatcctatttaagtaatgagttggatggaaatgctgtgcatgaactgaaggagtggatagctgcgtctgtggaaaatgaaaagtattttatgcagcggcaagaaatttggttttctgccataagtgtgaaagaggatgttaaatatgataagagcaaagcatttgaacaatttaaaaatagaattgctaatcagaggttgaatgataaaagagaacgtgaaaatttctgtttgtctaaattttggcgttatgcagctgttattgttgtattgttctcagtttcttatttttcttattggaggggtggaataagtataaaagaggtattttcggatatcattgtggaggctcctcttggttccagaacaaaattgaccttgccggatgggacattagtgtggttgaatgccggatcgcgtataacatattcacaaggattcggagtagggaatagaaaaatagaattgataggagaagggtattttgaagttaaacgaaatgaagaagttccatttcttgtgaaaacgaatagtttgctggtaaaggtattgggaacgaaatttaattttcgggattatccggatgatgcagaagccattgtttctttgtccgaaggaaaagtggcattgaataatttattgaaaaaagaaaaagaagcttttttgttacccaatgaaagggtggttttgaataaaaagaatggcagaatgcatgtggagtattctactgtttccaatgcattacaatggactaatggatatttattttttgatgaggaattgttgccggatgttgtgaaggagttagaacgtagttataatgtgaaaatacaaatagctagtgatactttgaatactttcaggttctatggaaatttcgttcatcgtgagcaaaatattcaggaagttttggaagcattatctgcgacccgtaagattcattatattattgaaggacacaatataactttatattaagtagggagtggattaaaattgtttaaccttaaaattaaaagtatgaatagaattagagctgtaatactgtaataggggtacgaaagggatgaaaaagaaaaggtgggaagatatagggattttcccaccttgatgaaatctctttttcgacttacgattgtgagtgcgcttttagagaatgcaaagttaatgatttttctctttaaaagctaagttcatttaattttttaattaataaattactaatttatgaaaaacaagagaaaggccatattattggtcggggctttgctttgccttaatttgaatatcttctcacagaatataccattgaaaatgaataaagtatcggtgaaaaaagctatgactgagctaaaagaaaaaagtggatattcatttgtgtatatagctggggatttagatacgaaaaagattgttgatatagacgctgagcaactgcaagaagttattgagcaaatcttggaaggacaaaatgtttcttatgagataaaagataaaaatatcattattcggaagaaggaagtagaacagtccatgttgaacgagaaaaaattacaagatatttcagggcttgtgatggatgttatgggagaacctatcgtaggagttaatgtgatggaaaaggggactactaatggtactattactgatatggatggtaagtttttacttaaagctcctgcgaatgcaactcttattattagttttatcggttataagactcttgctgttaatttggaaggggaaaagaatgtgaatataactctgaaagaggatttggaacaattagatgaagtggtggtggttggttatggaactcaaaaaaaatctagtttgacagcatccgtggcgacagtgcctgcaaaagaactgagtaaacagatggggcattctgttgcagctgctttgcaggggagggctccaggagtagaaatattgcaaaaggggggagaagctggggcagatatcaagatacttgttcggggagcaggtacatttggtgctactgaacctttatatgttattgatggtgcattttctaataatgggctaaattcgttgaatccttcagatattgaatcaatagaaatcctgaaggatggttcggcggctgccatttatggctctcgcgctgcaaatggggttgtgctgataactaccaagcatggtcaaaaaggtaaagcaaaagttgaaatttctgcaaactattctttgcagactccttctaaatatcttgattttctagatgcaaatgagcatcgcgaatatactaagcaaattgttgcaaattcaacaaaccagactcaagctccagaaaatattcatcctactaatcctgatattaatactgactggcaagatgcatatctaagaaatgctcctatgtataatttgaatgcttcaatttctggtggtggtgaatattcaacttttaatacaagtttggggtattttgatcagcaaggtattatggaattttctggttttaagaaatataatgcacgtgtcaatggaacgtttaagaaaggacgtttgactgttagtgaaactctttctgctgcttttacaaataaggagcctcaagtaaggatggtgatggggattcctactgttccaatgactgatgtagagggaaggtatgtatctgcaggtaaagattattatgtaaatgaaggaaaagttactaatccgtttgcatcttattccaatactgttcgaagaaataaaacagttaatgttactggtagtttgaatataggactgaatttatataaaggattggattataagctactacttggaggtgactatatatcaacaaataatatatctcggtccattgcttttgactccaattgggatgagaatggtaatgcagatcctgattatagcagaacgattaattcactatctgaaagtcgtggacagcgatttagttatacaattgataacattttgacttataagaatatgtttgctggtcatactattgacgcaatggtaggtacaagttggatgagagaatactatagaactatggggattggttctggttctacagatttgggtggtcctaatattactatttttaatgggaaaggagatataacaagtgaagaatacaattcagctttactctccttttttgctcgcttgaactatgactataaggagcgttatcttgtttctgcaagtattcgtagtgataaatcttccaaatttgctaaaggaaatagggtcggttactttccttcggtttcagtgggttggaatatacatgaagagaatttttttaatatagaatggataagtaaaatgaagattagagctagttatggtgaattaggagctaattttatagattcatattctttcctttctacggcttatggtccaataccttctgtattcggtgaaaatcagattggtcaaagtagtgtgatgaatggttatgtaaccaaatttgctcaggaaaatttgacttgggaaaaatcaatatctaaaaacgtagcattggaaatggcttttctgaataataaaatttcttttacagctgaatatttttggaaagataataatgacttacttgctccattacttccattagcatcgtcagggcaaaccattatgactaatgggggggatttgccagtctttaattctgcatctgttgaaaataaaggttttgaatttacggtaggttatcgtaataattggaaggattggagtttggatgttactgccaatatttcggcattaagaaataaagtaaagagtttgggtgagggagtacaacccattaaggcagaggtgatgatgagtggttcttttaatgaccgtcctactattactaaaccgggcttgcctattggtaccttttggggatatgtggtggaaggttttgataatgatggtaattttatttttcaggataataatggtagtgtgaatggtgtattgacaggaaaaccggatgggaagattgatgagaatgataaaacggatattggtaatcctcatccggattttacttatggtttaaatataaatgtaggttataagaattgggatttgactgcttttttccaaggaacgcaaggtaacgatatttttgctttaatgaaatatgattggtattttggaggagctaatagtgctaccctaaaggatgctttctataattcatggactccgcaaaatcctaatgcagaagctcctaaactgaatagtaaaaacagttctggcataaactcgcttccaagtacattctatgtggaggatggttcttatttcagatgcaagaatctacaaatcggttattcctttaataagaaattattgcaaaaattccatatagaatcatttagaatatatgcgggggtacaaaatttattcactatcacaaaatatcccttgtatgatcccgaagttagttcaaacgtgttgtttgacagaggtgtggatggtttctggcaagcacaggaaagtcctcatgaagcaacaatgaattctagagtatataatcttggtgtcaatttaactttctaaaaacagaataagtatgaaaataatgttgcgtaaaattatagttatcattatcagttttgtaactattggaatgatgggctcatgtgaagatatttttaatgatttggcggtgaatcctaatcaatcagacgttaattcattttatactacactagaaaattgtaataagggaattcttggtatctatgggtatatttcgactcctcgtaatttgggagcttgtggatttggtttgatgttgactcgtagtgatgaggggtgttcggtagctgattatggagtaccaggtgcttataatgaagagtttaccccttcttattattcattggttcaaccttttcagttaatgtatacagctgcttcccaagctaaccaaatgattgaaagtcttactgaaatagaattcagcaataaagaattacaggatgcatatttgggggaggcttattttcttcgtgcatttacacatttctttttattcatcaattataggaatattcctttgattaaagaattgcctaaggctcctaatgaatataagcctcaggcaacacctgaagaggcttgggattttattatagatgatctgatcaaagctaaagatttacttcctgacaagaatttttgggatgctaaaaataaaggacgtgtgacgaaagcttctgcttatgcacttttgggtaagtcatatctttatagatccggtattgaacccaaatatggaacttcacaaacaacttattataatgaggctgctgcggcttttgcagaaatcattaatggtaattgtggaaactacagattggtagatgactattcatggaactttgatgtggcacatgaaaataatgatgaatctatttttgaagtacaatttgtcggagtgttgaatacaggatttaacccaggatttgtggacagtgggttgttcaatgatgtccggtgtaaaatgtgtataatgaatagaagtagaaattcgaatagttctgcacaggttatgcacaattggttatatgataaatttgtagcgtcaaaaacagtgacaggagaaactgatccacgtatgtttggttcgtttgtttttaatgataatgtatcggagattatacgtccgaaaggtatgaaggttacttttcttgaagggaaggattgggaagcagaaatgggttcaaaggaaggaacatttggtgaacaatatgagttggcaatgggatataaaatgtgtagtaggaaatggttggattggaccttacctccgacagatgatgctggtgggcatttttttaatggacgtgcacaaggagtaaactggagaatgattcgttattcggatgttttgctgatgtatgctgaagctgtagtaatgggagggaaagccactgcaaacataaccccgttagaagcaataaacaaagtacgcgatagggtaggagtacctcatgtaacagaagctaatatgagaactattgaagatgaacgtattctagaacttacctatgaaggcttccgattctttgacttgcttcgttggggtaaagtagtagagcgttttcgcgaattggaaaatactgatcctttgtttaaaaggtttagcagggctcaatatatggggtttaaggaaaataagaatgaatgggttccattgccaattgatgaagtagagggtaatccatatatcactaaaaataatccaggatggtaattaaaaatagaataattatgaaagtattttattatattatatgtgcagcttgctttgccggctgtgtgtcatcttccaatgataaaacggtgaaagagaatggtagaacattgcataatggcattgtgctgcccgagcaatggcctcctagtatgattgatgatggagtacgttgcgaaatgtctttaccttatatttcaaacaaaccgactgttatttctgtaaatctaggacgccaattattcgttgatgattttttaattgcagaaacagatatggagcgtgtttcccataaggctatgttctatgagaataatccggtacttgctccggataaggagtgggaatacacttttgaacgtgctccttatgctgctcctttcagtgatggaatatggtatgatgaaagcgaacaaaaatttaaaatgtggtatttggctggtgccggatctatgcacaaacatcgtcaaagcttttatacttgttatgcggagtcaaaagatgggaagcattgggaaaaagtgaatatggatatagtgccgggtacgaatattgtagatacttgtgatcgggatgcggctacagtttggctcgataaaatgtgtccagaaccagaaaaacgtttcaaattcttcaatgtggaaaaacatagtggaggatggaaaataattttaaaatattcaaaagatggtattcattggtcggaaggagttgcgcaatcaggaccggtgggggatcgtaccactgctttctataatccgtttactcaaaaatgggctattagtctacggcaggggagtaaagcagacggacgctctagaggctatttggaaaatgaagatccagagatggcagttagcgtggcgcattcattggctaaaggaataaaggataaaaatatagttttgtggtttactccttccgataaggaactgccacatcctgaatttcctgatgtgcgtccagccatttataattttgatgctatgccttatgaaagtgttatgctagggttctatgctatgtggaaaggaccagagaatgatctctgtggtaagttaggtattcagaaaagaaatgaaatagggatgggatatagtcgggatggttttcatttttatcgtcccagttatgaacctgttatgggagtaaatgaaacggaaggggcatggaactggggaaatatgcagtctattattggcgtacctctcattgttggtgattctttgtatttgtattctagtggaagaatgaagaataaagtgatgtgggatggatttacttctactgggttggcaactttacgtcgtgatgggttcgtttccatgcatacagacacagaaggggtacttgttaccgagaaaataaagtttgatggtaatcatttttttgtgaatgcacaagcaaaggatttgcaggtggagataatggatgaaaatggtaatgtgattacgggattttccagagaggattgtaaggaaatgaatgatttgaacagtactaaacaattggtaacttggaaatcaggtaaaaaacttgctgctctttcaggcaagatagttaaagtgaagttttatgttacttgtggagatttatatgctttttggatttctccatgggacacaggagaaagtaggggatatacaggtggtggtggtccgggactcaatccttgtggaatcgatattaaataactgatatgtataaaacatagttgtgttacatcgtgtattttgttggtggctgcttcatgagaatgaagcagtcattttttgtattacagataaattttgcttggttgagctaagtcaatatttaagtatgaggaaaatgtagacataaaaaaaggagcaacgccttgctccaacctttgttaaccttaaatctaatactatgaaaaacacgttgcaaaggtacgtgttttagtgaattttgcaaataaaacaactaaaaaaatatgttttctaacacgttttaatacttttgtcctatttgttaaggatgaggactttttttatttacttgtattttgtcttttttacatataaaaccgtatatttgttgccacttttgcaaaaggataaaaacgaatggtttcagtagataatttgaaagtagagtttggagtaacgcctctgtttgaggatgtgtcatacgttatcaataagagagatcgtattgcgctggtcgggaagaatggggccggtaagtctactatgcttaagatattggcaggaatacaggcgcctacttcaggtagtgtttctgttccgcgtgatgtgacgataggctatctgcctcaagtcatgattctgagtgataaacatactgtgatggaagaggcggagatggcttttgaacatatctttgagttgcaggctagtattgagagaatgaatcaggagttggcggatagaacagattatgattcagaaaactatcgtaaactgattgagaaattcacccatgacaatgaacgctttttgatgatgggaggtaccaattatacagctgagatagaacgtacattgatggggttgggatttagccgggaggattttaaccgtcctacatctgagttcagtggtggatggcgtatgcgtatagagttggccaagttgctgttgcgacggcccgatgtgttgctgttggacgagcctaccaatcatttggatatagaaagcattcaatggttggaaaactttttgaagacaagtgcgggagccgttgtattggtgagccacgaccgtgcatttattaataatgtgaccaatcgtacgattgaaatatcttgcgggcatatctatgattataaagtggcttacgatgagtttgtggtattgcgcaaagaacgtcgtgagcagcaattgcgtgcatacgagaaccagcagaagcaaattcaggatacggaagatttcatagagcgtttccgttataaggctaccaaggctgtacaggtgcagagccgcatcaagcaattggaaaaaatagttcctattgaaattgatgatgaagataattcagccttgcggttgaagtttccgcctgccatgcgttccggcaattatccggtcatttgtgacggggtgaagaaagcatatggcagtcatatcgtttttcacgatgtgactttgactattaatcgaggtgagaaggtggcttttgtcggaaagaatggggaaggtaagtccactttggtgaaatgtataatggacgaaatcccatacgaaggtaaactgaccatcgggcacaacgtacagattggttattttgctcagaatcaggctcagatgttggatgaaaatctgagtgtctttgatacgattgattatgtggcaaaaggggatattcgtttgaagattcgtgatattctgggagcattcatgtttggaggtgaggcttctgataaaaaagtaaaggtactgtcgggtggggagcggagtcgtcttgccatgataaaacttttgttagaaccggtgaatttccttattttggacgaacctaccaaccatctggatatgcgctcaaagaatgtattgaaagaagctatcaaggaatttgatggaacggtgattgttgtttctcatgaccgtgagttcttggatggactggtgaccaaagtttatgaattcggaggtggagtagtaaaagaacacattggcggcatttatgattttttacagaaaaagaaaatagagagtctgaatgagttgcagctttcggcttctcctactgtgtctgccactaaaaaggaagaacccgaaacggttagtgagaacaaattatcttatgaggcgcaaaaggaattgaataagaaaattcgcaaattggagaaacgaattgcggattgtgaacagaaaatagaaaagctggaaactgagattggcgaggtggaagctgatatggctactcccgaaggtgcatcggatatggctttgtatgaaaagcatcagaaactgaaaaaggacttggatcagacggtagaagaatgggagaccgtttctatggaattagaagagatgcagggaagttaaagtatgtatcatatatatagaacaaatgaaagcaaaacattatttaccaatggctgtattggctctggcagtagctgccggatgcgacagtaaaaaggaagccgtcatgacttcgggtatagacttgacaaatttggacactacggctgttcaaggagctgatttttatcagtatgcttgtggcggatggatgaagaaacaccctctgaccaatgaatattcccgttttggctcattcgatatgcttgctgaaaataatcgggaacaactgaaaggattgattgtggaaattgctgccgggcagaatgcgcaaggtacaataggtcagaaaataggggatatctataatttggctatggatagtgtgaaactgaatgcggatggagtaactcctattcaagctgatttggaaaagattgcttcagtgaaggataaatcggaaatagttcctttgatggcggaactggctcatagcggtgtattcccttatttcagtttctatgtgggtgccgatatcatggacagcaagagcaatttgtttcaattgtatcaagggggtatcagtctgggtgaaaaagaatattatctggacaatgatgatgtgactgtcaatatccgtaataagtataaggaacatattgtaaagatgttccaattggctggttttgatgaggctgccgctaaaaagaaaatggaggctgtaatggatatcgaaacccgtattgcaaaagcttctttcagtgcggtggaacagcgtaaccctgcggccaattatcataaaatgtctttggatgaattaaagaaagagattccgggcattgactgggatgctttcttgaatggtataggcgtgaaaggggtgactgaactgagtgtttctcaagtggagccgattaaagaggttgagaaaattatcaatagcttgccggttgaaaatcagatcgcttatatgcaatggagtctgatagacagggctgccggttacttgagtgatgatttggtggcacaaaattttgatttttatggaaaaacactatccggcaaacaggctaaccaacctcgttggaagcgtgctgtaagtactgtaaatggagtactgggtgaagcggtaggtcagatgtatgtggagaaatattttccggcagccgcaaaagaacgtatggtgcagttggtaaagaatctgcagaccgcattgggagaacgtattcggaatttggaatggatgggtgacagcacaaagattaaagctattgagaagttgaattctttttatgtaaaggtaggctatcctgataagtggagggattataccggtttgaatattgaaaaagattcttattgggccaatgtgaagcgtgctacagaattcgaactggattatatgttatccaaggcaggaaagccggttgacagagatgaatggggaatgactccgcagactgtcaatgcatattataatccgaccacgaatgagatttgttttccggcgggtattcttcaatatccgttttttgatatgaatgctgatgatgcatttaattatggagctattggcgtggttatcggtcatgaaatgactcatggattcgatgatcagggacgtcagtttgataaggatggtaatttgaaagattggtggacagccgaagatgccaaacgttttgaagaacgtgctcaggtaatggtgaatttctttgatagcatccaggttttgccgggactcaatgccaacggttctttgactttaggtgagaatatagccgatcatggtggtttgcaggtttctttccaggcgttcaagaatgcgacaaaagatgctcccctgccggtaaaagacggatttactccggaacagcgcttcttcttgtcatacgccggagtgtgggctggcaatatccgcgacgagcagattcgtttgcaaaccaagtctgatccacattcattgggcagatggcgtgtgaacggagcactccctcaaataggtgcatggtatgatgcttttggcattaaagagggggatcctatgtatttggctcctgaaaaacgtgtctctatttggtaagctttgtatgtaaaagataataagaaagcatggtaattgctgagaattcggcatttaccatgctttctttttggaatttacatgataaacacctatttttgtgcccgatgaaacggagacgatacatagcatgggtattgatgttggtcagcattatcatgttgacagcatctgttctgcctcatcatcatcaccgggaaattctttgtttgcagcatgatatgactttgtgcggctgtcaatgttccgtgcagcatcagcagcataataatagttctgatgagaatcatacatgtaatgccggatgtgtgaccaagtttaaaagtgtaactccggatcgggcccaagacagtgtttctcctgattattcgttttgtttgctgttatatacggtgacggatgtattggcgctttcattgcggttgacagaacacaacacattaccttataattactatttagaaaaactgcattctacgtgtcttccccacgtaaaggggttgcgtgctcctccttgcgatgttcttgcttaacagatagaaagtttatctttttatccgcaactttgttgcattttctttacactaattttgcatttaataaaaagtaagaacaaataatatcatcatgaagaaacttatttttatgggagtcttaggcttgttcctcttaggctcttgcaacagtaaatcgggtcatgatcacgaaggacacgatcatggaacggaggaagcacataatcacgaccacgaagggcatgaccataatcacgaagggcatgaccatgaaaaagaaaaccacgaccatgagaatgaaggtcacgaagggcataatcatgaagcggaagcttctgcagccggacattccgatgagataattctggctccagaaaaagcaaaagcagccggggtagaatcggaaataatccggcctgaatcattccgtcaggtgataacgaccagcggtcaggtgcaggcagcacaaggcgatgaaagcgtagtagtcgccaatgtagccggtgtggtttctttccgccatccggtaacggacggtatgagtgtgagcaagggggctcccattctgaatatctctgctgagaatatgccggacggagaccctgtaaaacgtacccgtatcgcatatgaaaccgccaaaaaagaatatgaacgtgccgccaagttggtaaaaagtcagataatatcgcagaaagatttcaatgccattaaggagagttatgaaaatgcattattggcatacgaggctatttcaaagaaccagaccaagacaggtgtgtccgtcacagctcctttaggtggttatatcaagaattgtctggtgcaggaaggtgactatgtgtcggtaggccagcctttggtgagtatcactcagaaccgtcgtctgttccttcgtgcagatgtttccgagaaatattatggttatctgcatagcatccagtcggcaaacttcaagactccatacgataataaggtatatgagctgggtgagttgaaagggcgtctgctttcttatggtaaagcatccggtggtacttctttttatgtgcctgtaactttcgaatttgataatcggggagatgtgattcccggttcgtatgtggaggtgtatctgctctcgtcggaaatgcccgatgtgctggccttgcctgttacggcactgaccgaagaacaaggtttgtactttgtttatctgcaactggatgaggaaggatataagaaacaggaggtaactttgggagcgagcaacggaaagaaagtgcagattctgaccggtttgaaagccggtgaccgtgtggtaacaaagggagcttatcaggtgaaattagcgtcggctagcaatgcgattccggctcatagtcatgaacattaatcagccgtcctatgctaaataagattatacatttttcccttcagaaccgtatattggttctggtggcgtcggttttgctgcttatcggcggtacttacacggcttttcatacggaagtcgatgtgttccccgatttgaatgcgccgactgtagtgattatgaccgaagcgaatggtatggccgccgaagaggtggaacaattggtaacctttcctgtagaaactgccgtgaacggtgcgacccatgtgcgccgggtgcgttcatcttccaccaatggcttttccgttgtgtgggtggaatttgaatgggataccgatatctatctggcccgtcagattgtcagtgagaaattgtccttggtcagcgaggagctgcccgagaatgtaggtaaacctaccatgggacctcagtcttctattttaggtgagttgctgattatcggtctgacttcggatactacttccatgctcgatctccgtacactggcagactggactatccgtccgcgcctgctctctacgggaggtgtggcacaggttgccgtgctgggaggtgatatcaaggaatatcaggtgttgcttgaccctgcccgcatgaaacattacaatgttacgttggcagaggtgatgaacgttacccgtaacatgaatcagaatgccaatggcggagtgatttatgaatatggaaacgaatatattgttcgcggggtgctttccagtcatgatgtggatcagttgtcacgttccgtcatcaagacggtggaaggggtgcccgttacattggaggatattgccgatgtgaagattggttcgcaggaacccaaactgggtactgcttcggagagaggaaaacctgccgtactgctgaccgttaccaaacaacccaagaccgggactattgaactgacagagcagttggaagccgcattgaaggatttgcagaagaatcttccggctgatgtacacgtttctacagatattttccgtcagagccgttttattgaaagctctatcggtaatgtgaaggattcgttgtatgaaggtgctgtttttgtggtgattgttctcttcctgttccttgccaatgtacgtaccacggttatttcattggtaacccttccgttgtcattgattgtttctatattgactcttcactatatgggactcaccatcaataccatgagtttgggtggtatggccattgccattggttcgttggtggatgatgccattgtggatgtggaaaatgtatggaagcacttgcgtgagaatcgcttgttgcccgaaggggaacgtaagagcgtgattgaagtcgtgttcaatgcttcgaaggaagtgcgtatgcctatcttgaactctaccttgattattgtagtcagctttgttcctttgtttttcctgacaggaatggaagggcgtatgctggttccgttgggcattgcctttattgtggcgttgtttgcttctacggtagtggctttgacactgactccggtactgtgcagctatctgttaggtaataataaaagcaaaggattgcccaaagaggcatttgtggccgtatggatgaaaaagcattaccgcaatgccttgttatggtccttgaatcataaatccgcagtattgggttttacgggtggactgtttgcggtggcattggttatgttttttacattaggacgcagtttcctgccatctttcaatgaaggttcgttcaccattaatatcagttcattgccgggaatttctttggcagaatcggataaaatgggacaccgtgcagaagagttgctgatgtctattcccgaaatacagactgtagcccgtaaaacgggacgtgccgaactggatgagcatgcattaggggttaacgtgagtgaaattgaggccccgtttgaattgaaagaccgttcccgccaggaactggtagccgatgtgcgtgccaagttatctaccattaccggtgcgaatatcgaaataggccaacctatcagccaccgtatcgatgccatgctttcgggtaccaaggccaacattgccatcaaactgtttggtaatgatttgaacaagatgtttgccatcggtaatcagataaaggatgccatcagcagtgtggagggtattgccgacttgaatgtggaacaacaaatcgaacgtccgcagctcaagattgttcccaaacgcgagatgcttgccaaattcggtatttctttaccggagtttgccgagtttgtatcagtgaacatggcgggtgaagtcgtttcacaggtatatgaagaaggcaaagcgtttaatcttattgtccgtaccaaggatgaggtgcgtgatgagatggagaaggtgcgcaacctgatgattgataccggtgacggtcagaaaatccctgtcaactatgtagccgatgtggtttctgccatgggaccgaataccatcagccgtgagaacgtgaagcgtaagattgtgatttcggccaataccagcggtcgtgatttgcgcagcgtggtgaatgatatacaggaacggattgatgcgcaaatcaagcttcccgaaggatatcatgtggaatatggcggtcagtttgaaagcgagcaggcggccagccgtacgctgatgctcacttcgtttatgagtatcgtggttatcttcctgttgctttatacccagtttaagaatgcagcccaaagtggagtcattttgttgaatttgcctttggcgttgattggtggggtatttgcattgatgataacaacgggtgagataagcattccggctattatcggctttatctcgttgtttggcattgctacccgtaatggtatgttgttgataagtcattacaatatgttgcgcgaagaaggtatggagttgaaagaaagcattctccacggttcgttagaccgtttgaaccctatcctgatgactgcgttgtcttccgcgctggctttgatacctttggcattccgtggcgatttgccgggtaatgaaatacaaagcccgatggcgaaagttattcttggaggtcttttgacatcgactttcctgaacgctttcattattccgattgtttatgaactgatgaaccgaaagaagaaataatagaaataatatgaaacgaatcttagttataatagccctctgctctcccttgctgatgcaggcccagagtattgagcacattttgaaaagcatcgagcagaacaataaagagctcaaggcacagaaacatgccgccgatgcgaccaagatggaaaaccggacaaacaacaacttgcctgatcctacggtgagctacagctctttttacagtaatggtgccgaaggtggtcacggtacggaattcgttgcttcgcaaggttttgattttcctactcagtatattgcccgcaaccggcaggctactttgcagaacgaagcggtggacaagcaacaacaggctgcccgccgggatattctgctgaatgcgaagaatctctgtctggaccttattctgttgaatcaggaaaagacattgatggatatccgtatgaaaaatgcagatgaattacaggcactttatgaaaaacgtctgactaccggtgatgcgaatatattggaagtcaacaaaatcaagatggagcgtatgaatgtgcagacggaagttgcccaaaacagcgcagctcaccgcactgccttgcagtctctgcttgccatgaacggtaacatgcctttggagtttgctgaaaccacgtatcctgccatacaggaaatcaatgattacaatgttatgagggatgaagtgatggcgtcagaccttgacttgcaggccgccgccgccattgcccgtgccgccgagaagcaggtttcggtagaccgccaaggatggttgccgaagctggaagccggctttcgccgtaacacggatgatgcggtttcgatgaatggttttgtggtagggggctccttgcctttgtttcagaatcgtaaaaaggtaaagatagccaaggcacaggctatcagcgctcagcttatgcaagaaagtgctaaagaccgggtcgaggcttccctgatgtctcttttcaatgagatgcagcagttgaaggatgccatgaatgcgtatgatgtccctttgatgtaccgttcgctggatttattgaagcaggcattgaccgaaggacaaatttcattgattgaatattttgtggaaacggaaagtatttataagaatcttcaggcgtatatgcagattgagaaccaataccagaaggtgatggcgaatatttacaagaataacctataaaatgttaggactcggtaaaatctgtcatttgattattataaggatgaagaaataatccaaataatattaatgatttgtctgtttggaatacaataggataggggttatgttatataggcatgacccctaaaactataaatatggataacttgaaattactggcaatagtaaccggagaaggcgaatttgtgaataagaatttaagaaccggattatggctgagcgaactcacccatatttatcacggcgccaaaaagcaaggaatagaaattaccgttgccagtcccaaaggaggcgatactcctatcgatccggagagtttgaatcccttactcatggatgagataactaaaacctgttgggaagattccatatttaagaatgtattgcagcatactaaaagtttggatgaagtttccgaatttcagtttgattgcgtttatttggcgggaggacatggttccatgtatgattttccggataatattgtcctgcaagccatcttaaaaaagcaatatgaaaatgaaaagaaggtggcagccatttgtcacggtgtttgtggattgttgaatgtgacgttggcttccggcgaatatctggttaaagataagaagcttacaggattcagccgggctgaagaaattctggcaagaaaggaaagggtcgtgcctttcgatttggaaaccgaactgaaagacagaggtgcccgctacgagaaagcattgattccgatgacttcaaaagtcgttattgacggtaatctgtttaccggagagaatccgttcagttccaagaaaatggcagaagtcatcctgcaatgtttcagtaagaaataaagttattaatttgaataggaaatgaatttagaagaggtattgaacttccgccggtctgtgcggaggtatgataaaaataaaccgatagacccggaaaaggtgaaacattgtcttgaactggctacgctggctcccaatagttccaatatgcaattgtgggaattttatcaaataacgaatcccggactgatggcgaaagtttcagaagcttgtttagggcagtcggctgcttctacggcttcggaaattgttgtttttgttactcgtcaggatttgtataaaaagcgtgctaaatttgtgcttgactttgaagaaggaaatatcaggcgtaatagtccgaaagagcgtcaggaaaaacgtattagggacaggaagctgtattatggtaaactgatgcctttcatttatgcaaggtttttcgggcttctagggcttttcagggtgatattggcgagaaccatcagcctgttccgccctatgatgctggaagtttcggaatgcgatatgcgtgtgacggtaaataaatcctgtgcccttgctgcccaaacctttatgattgccatggcaaacgaaggctatgacacttgtccgctggaaggttttgacagcaggcggatgaagaaactattgaagctgccccatggggcaggcatcaatatggttataccttgcggcatacgggatgggaacaaaggcatttggggagaacggggcagggttcctttcgatgaaatctatcataggatataagagaacagggtattcctggcgggtgatgaaggtgtattcccttagatattccatcagcatgccgaatcgctcttcctgagtgtgcttggaagaagacgtcttgaaaccgtatgtggggtctgcgtgttccagttccttttcaccctttctgtatacttctttgacaaaatggcgtgtcggattgaatttgacactgtcgaagtgctttggccggaaattataagaatgccggttacatcctttttttgattctcgataaaatccggaaacggttgttgttcggacggcataaaaaatgtgcctgaagaattgggctgccttttatgacagagtgacttccggcacattttttcttgtttattcctgtttatttctttttcttcttagcttctttcgcccattctttagctccctgctctttcagttttgcggtgaaagcctttgctttttccatgcttgcgttttcgtcttcgggtgaagcgtatgcatgtttgtaacctttggtcacgttccattcacctcgtgtgaagtccgggaaggctactgccgcacagccgttatccatagagatagctcccagttcggccaaacagcaccattcggccaggtcatatacatccatgtccaaaggcagtccgttttgcaggcaatataccagacggctgtccatgatgaagtccataccgccatggccgccgacttcttttgccatttcaccatatttctttaaaataggatgctggtatttctcaacaagtgcttccatttctgcctggggtaagaatccgtgagagttcaaatcgtctactttgggttgcacacccgatgcggtcagttgtgctgcatccaaagcatatccttcaacgggatatttattggcaaaccctttgcttcctgtcagttggtacaggcggttgtaaggttggggagtcattacattatgttggatttcaataacttttccatttgctgtgcgaagcagggtggtggtatggtctccgttacggaattctttacattcttcgccggttctcttctccactaaatctttaccaacaacagatttggtgtccatagctactaaagtggttatacggtcaccacgatggatatccaatgcttgtgctacaggacccaggccgtgagtggcatatacatcaccccggtgtttcatgttataatccaaacgccatcccagtttgtcttctttgccgtttttccaataatgatcccaaaacgggcttaaattgtgaatgtaggctccttgggcacggattacttcgccaaatacaccttgttgtgccatattcagtgtattcatttcaaaccagtcatagcaacagttctcaagaatcatgcaatgcttgcgggttttttcactcaggttgattaagtcccagcattcttgcaggttcatggccgagggaacttcaatagctacatttttaccgttttccaatgcgcattttgctaccgggaaatgatgcaaccagtctgcggcgatataaactaaatctatgtctgtacgtttacataattcttcatatcccttttctccggaataaatggcagctttcggcatagatgctttctttaggatatcctgacatttttctgcacgggatgcttcataatcacaaagggccacaatttgtgtaccgggaatataagtgaagcgctctacggctccggggcctcgcattcccaatccgacaaatcctacgcggactacctccattttaggggtggttaagcctaatacgcttttttggccggccggacgttcaggagtatcaatcacaatggttcctttgtcccatgtccaggaatctcctgaacttacggtttgtgctgtcgtggtttgtggtaaacacatgcatagggttgtacccatacataagcttatcatcaatgatttaaaggttctcatactttttgaatttaaagattaaaattaataataagagttatttgtatttcaagggagtatagcaatcgacatgcttttctggttcattagaaaaggctgccttctgttttacgttctccattgtatctatttaattttaatgggcatttccgtgataaagaaataccatttttatatagtttcatcctctaacgttgcttgggtaaagcacaaaagagcgttctatttgttcttacattagaaataagaatctttttatttcgtggtcaaagatagtcattccttttaaattacatgcatgaatttcctatctttcttatgtgtaattgcaaaataaaataaggcttgtcaataagtagtaggaaggcagagggttaaaaaaagggcctgatgtattaacatctgggttgttgccgatttcttacataaaataggatggctttggaaagtttggatgatatttagtgaacaatgttttaatacaaatagcagattatttgatcaattattttatatgagaatgaattgatttacagttgtttgtcttcttttactgaatttgagtaaaagaaatacctaaattagtaaggaactttattgacttgttcttatgtttgtggtgttaattttaatttaagataatgtaaattatgaaaaatgccaaaacgttaattaaaagtcaatgcaggaatacgcatcaagccttgatgtgctttctttgcttctttttcttttttgcaggaatgcatcaagtggtacatgctgttccagatgttgcaatgaagatagatcaggatgtgcacattactggtatcgtacaagataccaataaagagcctatgattggagtatcggtaatggtgaaaggtactacgaatggaacggtcaccgatattgatggaaactatagcttgtcggtgcagggatctaaaagtgtattagtattctcatttgtaggatatgtaaccaaggaagtgactgttggaagtcagaaaacgatcaatgtaactttggctgaggattctaaaatgatagatgaagtagtggtgattggtttccagtcacagaaaaaagggaatttgaccgctgcagtagcttctgtcagtgcagagacactggaagacagaccggttgctaatataggacaagctttgcaaggcatggttcctggcttgaacatcagtattgaaggcggtgaccctaacaaagttccgaatttaaatattcgtggtgccacgacattccgtcagagaggttcatccaatgacgataaaaacaaatttgatgtagtttccggttctccgctgatcttgatggatggtgtggaaattactgctgaagacttgaaccagttaaacccgaatgatatagataatatgtcgtttctgaaagatgcttccgcttcggctatttatggtaccagagctactttcggtgtgatattggttaccaccaaatcgggaacctacaagcagaaagcgaaaatagattattcttataatctggctttcgaccagccatacgaattgcccgatattttggattcttatcatatttacaaagctggtgcggataaaagattgtggaccggtgaaatcactgaatacacccagcatgacaaggatatgatggaaaatatgatggcatatatcaaagatcccgtaaataataaaccttattatatggaaggtagtgccatccagtgggtaggcaatacgaatccatataaagaattagtgaaaaactggactcctacccaaaagcacaatctttctatcagtggtggcggtgacaaaatcagttattacatttctttgggtatgcaagaccagaaaggtatgtataaaatcagaaccgatgaattgaaaagatacaataccatgcttagtgtgaacgctaaagtgaatgattggttcacggtggcagccaaggcttcctataatgtatttgattatgagggaccgacccaacagacagatggaatgaatctttggcaatatgccaaaacctattatccggaaaactttatttatcagccggtgctgacaggagcagacgatccgttacccaactatgtgacagaaaatccggtgagttatttatatgcaggtggtcgtagtgttacttccagaaggaaaacaattctttctatcagtccggaatttactatcttgcccaagatattgaagataaaggctgacttgtctttcactccgactagttatcagaaagaaaagactcatcctaaacaagcgcgtgttaataattcatggactgctcttgaaactcgttgggctaccgaaaatagcggagaggtggtacgcactactacagacaggtatgccatcaacgtatatgctgattataaccagaccttcaaagaaaagcataatgtttctgtgcttctgggtgtcaatcaggaacaagaaacttatgccggttctaccctttatttgaccaaaatgcttgatccatacattctgaatcctgaattggtggaagacgtaacggcaaacacttcaagcaattatcatcatgaggtagcgtcaagggcgttgtttggccgtatcatgtataattatatgagcaaatatctgatagaagtggatgcccgttacgatggtagttccaagtttcccaaaaactctcgtttccaattctttcctactgtttcattaggatggagagtttcggaagagaaatttatggactggacaagaagttggctggacaatttcaaaatcagagcatcgtggggacgtttgggtagccagcctgatacggaatatccttatcagtctgttttcggaaccgagcagggatacttcttgtttgacggaacacgttatcccaccggtatcgttactccttcattgatcaatcctgaattgacttgggaaaaatcaacgaccaagaaccttggttttgatttcactttcttgcagaaccggttgacgttctgtgccgatattttcgaaagaaaggtgactgacattttgattccgggaggaaaagattatccggctttgattggtgatgataatctaccttttgaaaatgcgggagtgctgaaaactaccggctttgaacttcaggcaaaatggtcagataaactgtcaaacggatttgcttatagtgtgggtgttgccctttcggatgacaaggctgaagttttaagttatccttccaatcctaccaataagattggtgacggtgtattgtacaagggatataccgtaggagatatttggggatatgaaaccggaggtatccttcaggaaagtgattttgacggggtaggtcccaacggaaaacctttgtaccatggagcctatttcaagggtggacagccctatccaggatacgtttggtatcaagatctggatcatgatggtgtgattaccagtggcttgagtacggtggatgatccaggagacaaaaaggtaataggtaataatgcaccgcgttatcgttataacattaccgccaacttccagtacaaaggatttgacctggatttgatgttccaaggtgtaggtaaaagagattattggttgaaggatgtttccagttactggggtggaggagccggttcatgggaaacatacaatcagtcatggacgcccgaaagaacagatgccaaattccccatgtatggttccggaatcggcagctatgctcaatcaggctatttgcttgatgcttcctatatcaaattgaaacaggtgatcttggggtacactttcccgaaagcattgattggcaaagtaggtttggagaagttaagactgaatatagccgcttataacttgtttactctttcggatgtgcccaagtattatgattcggactatctgtctgacgcatatccccctaaacggacgtttagtgtaggaattcaagtaggtttttaacgttttaaatcaatagaagttatgaaaaaatattcaattatagctttattcgtggctctggtagtatctctgtcgtcttgtaacgatgactttatgcagcggaacccgatagatgatatggccgatggtacgttctttacgaaagaagccgatttgcagctatatctggacggaatttatagatattatgtatatggtcacggtcacggtggaactaacagtaccacacatgataaaggtttcttggcagtgaaggcaggcagccaaataatctttggagatgcttttagtgacaatactgtttatgcaggcgatattgatggtaagttgggaggtacttatgacactccgaattcggcttccaagaattttgacacaccctggcagtgggaaaaacttcgtaaagtaaactattttctgaatcattacacagaagtaggagatcctgaatcattgaaaaaatatgcagcccaagcttatttcttcaaagcatgggattactatatcaagctggtggctttgggcgaagtgccttggctggataaagaactggatacggcttctcccgagttatacggtccacgtatgccccgtacggaactggtagaaaatatcttgaaatgttttgattttgctgttgaaaatctggaagataatgataattcttgcggatacatcaatcaggatatggctttgttcctgaaatctcgcttctgtctgttcgaaggcactttccggaaatatcatacagaattgaatttgggctctactgccagtaaattcttggaaatgagtcgtgatgcagcaaggctgattatgaataaggacagatatcatcttttcaaaaatgcgtcgggagatgcctactggcagttgttcgtacagaagggaacacctgaactggagggtaatgaggaaacgattcttgcacgtgtatatgacggtgtgaagttaggacatgataacccgcgttattggggaatgaataatcatacacgttactgtatgggagctcctgtatgtatgcttgaagaatatttgtgtgaagacggacgccctatttacattggaggcagtgaaggtaattatgaagtaaaccctttgttcaaaggatatgacggtatgtgggaggaactggacaatcgcgatcctcgtttgaaacaaacagtttgtaaaccaggtgaatatgcttctatttttgatatggacgacaatacctatggtttggaagaaaccggggtgatctatccaatgattacttatgctaccggtggtggatctccgatgaagcactataattctacagtgaccggttatcgttttatcaagcactggatgcccgattatgcaaactgggaagctaatcccaaaggggtgcagacagcccacatgttccgttacggggaattgttgctgatttatgcggaagctagggctgagttgggagaaatcaccaatgaagatttggatattacgatcaatgcattaagagaaagagccggatacgactttgccaaatatcccaatgcccgactgactttgtccaacattccggctgatccacgtctggatgctatctatgcgcaaaaactggattattccgtatctcctattcttcgtgaaataagacgcgaacgtcgtgtggaaacgatgatggaaggcatgcgttatgaggatttgatgagatggaaagctggtaaattattcacagtttcagtgagaggaatgaaaatgacacctgaaaagattgaattgtacagtaagaaccgtaatgatgaaacgtataaggattatccgtacaaggtgacggttcctataggagaagtaggtaatcaggtgattgtggatgcagaaggattcattattccttggcctacctctaccactgttatcaacggcgtgcgtccttgggatgacaaacgttactattatccgatacctctgaatgaaatgctgatgaatccggaactgaagcagaatccgggttggaaagacattaatagataacctataaatataacgcaagattatgaaaaaaaatatatatttcttagtaggaatgttttcattcggagcactgtgtacggggtgcagcgatgatgacaacacaggcaaagcggtaaatattaccgtgaataatgctacgaatattgaaagcgatatcttcgggattgatgtgacggaaggacagcctctgcaactaaaaccgttcatcatgcctgagagtgcaagagaaaacgctgtcagttaccactttgcaggagaacccactggagcgattgaattgagtgaaagcggtttgattactcctaaattaactacacctgccgaaggggatatcccgtttccattgggtacggatacgattatcgtcagggtggacgacggttcgggtacatacgtcagatatccggtccgggttattagtaatgtagttattgtttcaagtatcacgattcagtccgctggacaaagtgtggaagtggagaatggtaagacattcaatctggctcaatatgtagcaatcaatccgagtaatgccaccgacaagagcgtgacctattcgtcgcaggacgaaacagtggctacagttgacccgaacggagtaataacggtaataggagaagttggacaggctacaactattacggtaaccgcaaatgatagaggcaaaatgtcagccacttgtagagtgaaagtagcggctgaagctcccatatatgtaggttttcctttctctgataattggaaatactcaagtaatataggtacgaaagaaggggacatgaagaatctgtttgatgataagaattcaactttttggtgtcccgatatcttaactcgtcccatttatgatccggtatgttatctggatattgacttgggggaagtgatcaagttcggtcaattgggatacaggcatcgtagtttgaattattcccatctgcaatgccatagctttaaactagaggcaaagaaagaggcgggtgatgcttggagcgacttgggagtacaagtcacagcacctttgaaggtagatgattaccaattgttctctgttgaaccgatagaggccagatatatccgcataacctttatcaaaggtcatttaagagaaggtcagactgattggaattattcagaagcaggaaatgtttctgttggagatttgcaagtattcatttataacagataaatgatttaaaacatagaaggggaatctttgcaaagatttcccttctatgttttattttttacaatgctatcttttccttacttttgtatttattatcaatttcaacttttaactcaataagccaacatgaaaagcagatacttattattctttcttatccttatatacataatttccccatgcaccgctaccggagactataaattccggacaatgtcgcctagcggtggcttttattatgatggcataaaggctatagagcaggacaaggaaggttttatctggacgatgatggattatgaactttatcgcttcgatgggtatcattacaaaaaatattatccctattttgcctcgatggcgcctacaaaaaggtggatattcaataatatggcatccgatttattagggtatctttatgtcaatacgaacaatggcgtttatcgttatgaccggaattcggatcagtttgaaaaaatctatgatccggtaagccatatcaaggtagataaggcaaacaatgtatggatccggatcaaagaaaaatggagtattctgaatacacagactggagaattgaatactcccaattatgatgggaaagcagcgggtggcgtcaataccgccttttgtatttataataatgatctgtatacatttataggacaaaaagtatatcgtttcaattacgcaaagaatgaatttgtcttttgtctcacattgcccgactcggatggaaatattcgttttgcacgggcatacatggggaagttatggatattcgtcaacaattctggattatataaaatagatatgtctacctttaaaatagaagaccattatatattgcttactgactatgaaggaaattcattgcggacattctatattgacaaaaaaggttatatctggtttggaacaattgatggcatttatatattcgatcctacagacggtaagttgtcacactataaacattccagaacagatccattcagtttgccgaataattccatttgggaaatcagtgaggaccggcagagtaatgtatggattggtacgtattcgggaactttatgctatgtgaatattgatgaaaacaatgccttcaagacataccatcctcaaaatagcggattgaatcataccccggtcagtgcgtttgccgaagatcaacagtatctgtgggtaggtacggaagggggtggtataaaccggatgaataaagccacgggagaattcagctatattacaagtgcaaacagcatcacttccaacaatataaagtcattgattacagatgctggtcataatttatggatctctacatttatggggggattggatttgtataatgtcggtcggcagaaggtgactaatttcaagcataccaaaggtgctcctcattccttgctggtgaatgatgtgcggaagacgattcttgaaggggactcaggaatgtgggtcgcttatcaatatcaaaaggcggaagtgtcttatttttcgtttcgcgaagaatcgttcacccatttcagtttggacagtataagtaataattcttatttgtttgatattcttcgtcaaggggaaaaaacattgtgggccattagtaacgaaaccctttatcgcttggacatagataagcatgtcgtcgagaaaatgattcctaatgattctacctatttgggattgtttactttctgtctggatgattccggaaatatttggattggtaccattggtaacggactcattaaatttgataccaatacttcccgttttatatctttgaaagatgtattgcaacaaagtgtttattccatttatagtatctgttatgatgacgggaacatttggatgggaaccgatgatgggctatattgttataatattgtaggtaaccgattgatgaattttgataaaagagaagatacacaagggcaagtttattatcctttggcctgtatgaaaggaatggacggcttgatttattttggcgggacaaatggttttaccgttattgaccccaaaaagatttcttataacagttataagcccagagcgattatttctgattttttcatcgatcatacatccactcatccccattatttgtttgataattcacttcatgaaataatccttgagtatgatcagactaactttggtttccaattttcttcagacaattaccatattcctgaaaagaaccggtttaaatataggttgagaaagtatgatgatcattggattactacgaatgcacagaatcgtattgccatgtattcaaaagtaccagccggaacttattatttcgaagtttatgctgccaataatgatggtgtgtggagtgatacccctacagtgattaaagtaatcagaaaaactgccccttggtatagttggccagcatatatcctctatgccttaatgattataggtctgatttacttgatttgcagacattatgctgacaagaaaaaactaaagttacaactctacttggagaatatagaaaaagataaaaaggaacagatccatcaggcacaactgcgcttttttactaatatttcgcatgatttcaggactccgctttctcttatcatagccgctttagacaaattgcgacgggaaggtttgaaagaatattattatcggatattgaatggcaatgcacagcgtctcttgaacttggtgaacgaactgatggatttcagaacggtagaaaacggcatgatgaaactggaattgcaaccattggatataaatcatatagtcaaagaaatagcgaatgattttatagactatgctgaacaacgcaagattgattttcaggtgatttgcgatactgaattacctgtgacgatttatgcggatagaaatattgttgagaaaatagtgatgaatctgttgaataatgcatttaaatatacgcccgacaatggaaaaatattgctggaaacaagaggtcgaaaagattgttttacttcagaatataagaacaattttatagtgggcgaatgtgttgatgatacttttttcatccttgtcagtgataccggagtcggtgtctctcatgattccattagtagcgttttcgacagattttataaggtgaatactgtaaatacagattcgcatttgggaacgggaattggattggcccttgttaaaagtttggtattgctccataaaggcagtatctctatttttagtgaaagaggacggggtactgatatggttgtccgtctgcctcttgatagtggtatgtttaatgaatccgattttataaggcatcaagaaacgagagctgaagaaataatccggacagactcggaagaaatggcaacttctgttgaaatgaaagggatggaagatgaattgctgcattcaactaaaaagaaaatattgattattgaggataatgaagacttgagaatgttgattgccgaatcattgtcggatgaatttcaggtaatgcaggctggtgatggagtggaggccttaaaactgatagaacacaccgattttgatttaataatcagtgatattatgatgcctaataaagatggcatttctttatgtaatgatataaaaggagatatgaatacttcacacatacccgttatattgttgacagcgaaaacaagtctggaaagtaagattgaaggagtggattccggtgctgatctgtattttgaaaagcctgttgatttgacttatctgaaattatccattcagaatatatttagaaaccggcggcaactgaaagagcattatgccaaaaattattatgctgacagctgtgaattatcttccaatgaacaggataataagtttctaaaacaatttattgcttttattgaggcgaacatggatcagtccgagatggatatcaatcagattgcgggagaactatccatgagtagaagtaaactttacactaaggtgaaaagtctgacgggaaaatctgtagtggagtttgttttgaattgtcgtcttcgtaaggcggccaagctgattattgaggaaaacatgaccatgagggaagttatgatgcatatcggtatagagagtcaggcttattttactaattcatttaaaaaggtatttggcgaaacacccacagcttttgcagcaaagcataaaaaaacgacccgttaaatgaatcggataaaataaatagcgattagagtaagctatcagaaaggcgaaatagctattttcgcataaactttaaaaaaaataatataatgaaagcacgcttatccattctgatagttactctattactgatactgcccagccgtgtgtcaggaatcggacctgatacaattttttccgacctacagaaaatcatggaacgagtagcggattggcagatcaataattttacttatcaaaagacaggcaatctgcatgattatggtattgatgcatggaccaatgcagtactttatgcaggtatgttgaagtgggttcaaacaacagaagtaccttctacttatcttgattggttaatgaaaataggagaagagaatgagtggtccgttcctgcaaactttgctgactacccgaaatatcaatattaccatgcagatgaattatgcataggacagttttatctgggtatgtacgatcgttataaaaaagatgcgatgcttcatgctgtgcaagaaagagtagactggattatgaaccatccggcagataccagcatgagatattccaataaacagtgctggacttggtgtgatgcactgttcatggctccccctgtctatgttcatctggcccgaatcacaggaaagaccagctatctcgagtttatgcatactcattttttgcaaacttatcatcatttgtatgactggactaaccatttgttctttcgtgacgacagttattttggtaaacaagaagcgaatggcacaaaagtcttttggggcagaggaaatggatgggttttggcaggaattgccaatatactcgaattattacccaaagactcgggtctgcgacctttttatgtgcaattgtttgtagagttggctgctcaattaagtaagttacaggatgatcaaggattttggcatgccagtttgcttgatccggatagttacccgtcacccgaaaccagttccactgccttgataacctatgggttggcctatgggctgaatcatcatttgctggatacatcttatctgcctgttgtccggaaagcatggaaagcactgacttctactgttgatcaaaatggaaaggtcgggtgggttcaacctatcggagccgatcctaaaaaagtaacgcgtgaaatgacagccgtatatggggtgggagccttccttatggcgggaaccgaaataataaaattgatcgaataatcattatcagtcatatattatgaaaaacaaaaagtatctttttttcatttcgctagtttttctctgtgccttctctattcgttttgtccaggctagagatataacttcttttaatgaaggttggagttttaagaaaggaccttttgctaaagatcctctgttgttctctgccggttttgatgcccggtggcaggatgtcaccattcctcatacgtggaatgctacggatatgcagaccgaaatgaataattattatgccggtgaggcatattataaaaaacaatataccccggcagcagaactgaaaggtaaaagggtattcttacgttttcaaggtgtaggttctgttgccgacgtgtatattaacaaaacctatgccggtaatcataagggcgcgtattcagcttttgccattgaaatcagtaaattgttgaaatatggagagtctaatgaaattttggtgaaagtcgataactctccccggcctaatgttattccggtcaataatactttattcggagtgtatggggggatttatcgtcctgtagaattaatcgttaccgaaccggtgaatatagctgtaacggactatgcatctccgggcatttatatcagtcagaagaatgtgaatcgtaaatcggctgatgtaaacataaagataaaacttgaaaacaagaaagcgcaagctaaaaaaatcgtagtttccactacgatttatgagcgtgacggtagggtgaaggcacagcagcaatttcctgtaacggtttcgccacagggaaggcaaatatatgatcaggactttaccatcaagaatccccatttatggcaaggtctggaagatccttatttatataaagttgtagtcaatcttttggcggacgggaaagtcattgacgaagtgagccagcccttgggcttgcgtcattatgagctgaaggctgcggacggaatgtatctcaatggtaagaaagtgcctatgtacggagtatgccgtcaccaggattggtggaagttggggagtgcattgacagataaggagcatgatacggatttggctatcattcgggaaatcggtgccacaactatccgttttgcacactaccaacaagcggaacgtatttatgcaaaatgtgacagcatcggctttatggtttgggcggaaattccatttgtcaatcgtgtcagtacacaggaaagtggcaatgccaaacaacaattggtggaattgatccgtcagaactacaaccatccttccatttatatttggggacttcataacgaagtatacgctccttataattataccgtgtcattgaccaccgaattgaatgacctggccaaaacggaagatccttatcgtcttactgcttccgtcaatggatattctgtggtaaatcaagagtctaacctgaacgctgatgttcaaggtatcaatcattatttcggttggtatggaggcaagattggcgacatagaaaaatgggtaacaggtatggagcagaatttcccagattaccgggttgttttctctgagtatggtgccgaggccaatattcaccaacaggaagaggcagtaggcgaagtcggaagatacttttctcaattttatcctgagacattctctactaaatttcacgaaattcagtggggggtaatctccaaacacccttatttggtagcttcttatatttggaatacttttgattttgctactccggccacggcacagggtggcgtaaaggcacgtaatatgaaggggttggttacttttgatagacaaacaaagaaagatcctttctattggtataaagccaattggagcaaagagccggtgctttatataacccaacgaagagctactgagcgtgagaatgaagtgactcccgtaacggtgtattgtaacgtaggtgttccccgtttgtttgttaatgggacagaagtgaaaacagtcagtaaaggacagacttcggtacattatatttttgaaaatgtgacattgaataaaggggaaaatgtaattgaagcccgagtggatcatcaagggaaaactcttgaagataccattcgatggagttattcaccggaaaataaaaatagacttaatttgtccgatccgaaagagaaaacaaaggaacatgtcggactctaattcgtggtggattttttatacatttaactcaaaactaaatttaaaatgaacgaaaacatgaaaaagtgtttttatattttatttttatttctgtcaatgcccctttgggcacaagcacagacaagacgggcatccattcccttgcagcatggagctcatagaataggtaaccgtaccgatgcagatatggaacgttggcgtcagcatggactgggacaattcatccattggggagtatatgccattcccggtggcttttgggaaggtaaatgctatcccggagctgccgaatggatacgctcgtggaaagaaatgcctaaagatgcctatgatagcttgtacaaacagtttaaccccacttctttcgatgcaaaggcatgggccaaacaggccaggcagatgggggcgaattatatgatatttacaacgaagcatcatgatggtttctgtctgtggcctagtaaatatactgattacaccatagcccatactccctataaaaaagatgtagtgaaacaaatagtagatgcctataccgctgagggaattgatgtgcatctctacttttccattattgactggaaccataaaggttatcgtcctgcacctccagaaacccggcaagatagtattgcgtatgaaactttcaaggagtttacccgcaatcaattgatagagttgctgactgattaccctgctatcaaaggattatggtttgacggcagttgggataaagcctggatgaatgaagcggcgtgggtggatactttaggtcttgaattgagaaagctccatccgggactcatcattggcagtcgttttcgtgccgatgaatatggaaaacggcattatgattctaatggagacctgattgatgattatgaccagacttgggaacgggatttgccaaactccctagaagacctgaatggtagtgattgggattgtgtgatgaccattcctgaaaatcaatggggatatcatgctgaatggcggggatacgtaaagacatcatacgatttattggagatgatggtgaaagccgtttctctgaatggaaattttgtactcaacttcggtccagacggaaaagggaatatccgttcggaagaaaccaagctagccaaagaaataggggattggatgaaaataaataaagaagccatttatggtacttcccattcaacagtacagaaacaagattggggatactttacgcagaaaggcaataaattgtatatgtgcgtattcaaccgcccgattaataacctgctgaagatagaaataccgaaaggtggaatcatacccatgaaggcttatttcctagaaaataatcaggaaacggaaattcagaatgcaggtaaaaacaagcggaacagttccttgtatcatgtagctgtacctgcttcatataaaactgaccgaccttttgtcattgtcctcgaaatgcaggagaatacgaaagaggaaggtgaatatcagcaggctaaaatataattattctcattttatttgttccaaaagatcgtttagtaaggagaattggcgggatttttttaattttgcacttacaactaattaacagataagaaaatgccgttaaatttacccgataaactacctgctattgaattgctgaaggaggaaaatatcttcgtcatagacaattcacgtgccagtgcacaggatattcgtccgttaaaaatcgtgatattgaatttgatgccgttgaagataacgacagaaacggatttggtacgtttgctttccaacactcccttgcagttggaaatatcatttatgaagttgaaaagccatacatcgaaaaatacgccggtagaacatatgaaagcattctatcatgactttgatttgatgcgcgacgagaaatatgatgggatgattattacgggagctccggtagagcagatgccgtatgaggatgtgaattattgggatgagattactactatttttgattgggcgcgtactcatgttacctcaactctttatatttgttgggcggcccaagccgggctttatcatttctatggagttcccaaatatccgctgaaacaaaaaatgtttggtattttccgtcatcatatcaatgtacagggattgcccatattccgtggttttgatgatgagttttttgtaccacatagccgtcataccgaaatacaccgtgaggatattctgaaagtaaaagagttggctttaatagctgagtctgatgagtctggggtttatatggctatggctcgtaatgggcgtgaattctttattaccgggcattcggagtattctccttatacgcttgatacggaatataagcgtgatttggcgaaagggttgcctattgaaatgcctgtaaattattataaggacgataatccggacaatgccccggtggtgcgttggcgcggacatgccaatttgttgttttctaattggttgaactattatgtatatcaggaaaccccgtttgatataaatcagatacgatgatcagacaacgaaaaatagaattattagctcctgctaaaaatctggagtgcggtattgcagctgttgatcacggtgctgatgccatttatattggtgctccccgtttcggagcacgtgcggctgcggggaattcattggaggatatcgctgagttggtgcggtacgctcatgtgtataatgttcgtatctatgtgacggtgaatacgattctgaaggatgaggaactgaaggatacggaaaaaatgatttgggatttataccgtgccggagtggatgctttgatcgtgcaggatatgggattgttggaattgaatctgccacctataccgttacatgccagcacacagatggataatcgtactcctcaaaaagtaagattcctggctgaggcaggtttccgtcaggtggtattggctcgtgaactttctcttgttgaaataggaaatatccatcatgcttgtcctgatgtgcctttggaggtatttgtacatggtgctttgtgtgtaagctatagtggacaatgttatgttagtcaggcttgtttcggacgtagtgccaatcggggagaatgtgcccagttctgtcgccttgcttttgatatggtagatgcggacggtaaatctatagtaaggaataagcatttattgtctctgaaagatttgaatcagagcgaagagttggagcaattgctggatgccggagcttcttccctgaaaatagagggacgtttgaaggatgtatcttacgttaaaaatgtaacagcttattatcgccagaagctggatactgttttcaaacgtcgtaaagagtatatccgtgcttcatcgggaaaagtgaaattagagttcaaacctcaattggataagagtttcagtcgtggttttactaattattttctttttgacaggaataaggatattttttcttttgatactcccaagtctttaggggaggagatggggacagtgaaggaaattcgtggtaattatcttaccgtagccggaatcaagtcttttaataatggagatggcgtctgttttttggatgagactggtaagttgcagggatttcgtataaaccgggtggagaataataagttatttcctcaagagatgcctcggataaagccccgtacgatactttatcgtaattttgatcaggaatttgagaggttgatgtcgcgtaaatcagctgaaaggaaaattgctgtcattttaaaattggctgaaaataatcggggctttactctgtctctgaccgatgaagatgatcacagtgtcagtgtggtgctggaaagggagaaggaatgtgcccgtactccgcaggaagataacttgcgtacacaacttggaaagttaggaaatactccatttgaagcgtcagatatagtgattgactggtcggacaattggtttattccagcttctatgcttgccgaacttcgccgtaagggaatagagaaactgctggaagtgcgccgtattaactatcggcaggaaatttacaagttgcctcgaacgcatcatgcttttcctgtgaatgaattgacttatttgggaaatgtgatgaatgctgatgctgtttccttctataggaatcatggcgtgcagcgtattgctccggcttatgaaaaggctccggcagaagaagcggtattgatgttttgcaagcattgtttgcgttatagtatgggatggtgtccctcttggcataaagtgcgttctccttatagggaaccttattatttggttagctcggataacagacgtttccgcttagagtttgattgtaagaattgtcagatgaaagtctatgctgaaaagtaagtacatcggattactgtttttggtgttggctattttaatggcttgccaatatccttcacctgttactccgagtggggatatgccgcaaaagaaaagggattctgtcaattatttgatggaacggcattatacattaaacagtaattttgaggttacttcagattcgcttatgttacagcaactgccattggttgatgtgcttcctgtttttaaaggagaacggctggtgatagcggagtttatgatacaagctgctgatagtgtggattctgtatgggtaaaggtagcacgggaccaggaaacaatgggatggatacatgaaaaggaattgttggagaaagtagttcctgtggattcagtgtcacagtttattcattttttcagtaattctcataccatcgctttctttgtcatattaggctttttcggtatttggtatattcatagggctattcgtcgccagaagctgcaattaatctggttgaatgatattgatagcgtttttcctacagttctttcttggttggtagctacagcagctacgctttatgccagtattcagcattttgttccgggaacttgggagcagttttattataatccttctttgaatccttttagcttaccttttattctttctcttttcatgtttaatatttgggggattattcttgtggggttggctactttggatgatttgtttcatcagacacatattgaagctgcatgtttttatttgttgggattgatgtcctgctgtatctttttatatttgttttttacatttactacgtattactatttgggttatccatgtttattggtatatgctgtatggtcatttaatcgtataaagcatgcttcccggtataaattcagttgtggaaattgtggggcgaagataaagaataaaggagtgtgtcctcattgcggcgctgtcaatgaataattttattgtttgtttcttttaacaaaggctcaagcagttttctattgtaaacagcattttctctatgtacatacactaaaacaaataggtttgttctagaagctatgggtatcatttacagcagtaataaagttcttgcttttcttggtgtgacagaataaaaaataaatttgatttggtaaatgtggaaacagaaagggagttcgtgatgaaccccctttctgtttttgcaagaatggttagaagtgataacgtatatccactcccagttgtaaaggcctgcttttttgttcgaatcctctatgcatggtttcaaaatagaaggttgtataatccttgttggttaaattacgtccccatacatctatctgtaaagcttttgtctgcaaagaaatgcgcccgttcagtgttccgtaaaaactttgtgagacattgtttttttcagtccaataaatttttcctgctccggtatagctcatgcctaaagtcaggctttgcatccaattgcttttatcgaaaaagaaactataatttgcgcctgcattcatggtatggcggggaacaaatggtacataattgccgctataatcaatttgctcttctgatgatgtagtacctccgtcatattttttgaatgtggaatgagtatatccataacttacattcatattcaggtttttgttgatggatgccagaaagctggcctctactccataactttcgctactaccggcattgaccatcattcgtcccaagccactattgacaaatttggcgatttgttggtcgtgggtatccatgtagaatgcggcaaggtcggtcttcagtttgccgttgaacaaactgagatgtgatcccacttcgtaattccagctgtactcgggcttgtagacagttgtttcttgtacgttcaattcttttccgtagttgggcatgtgttgcttgatcattccttctatcatacctgccatagattctggtgccttgtctagtatggcttcaatcattttttgttgcatgtcactttgtatcagttctgaaaacatctgtacgttataacctccggaacgatatcctctggttatgcttacatacatattgtttgcagggctgaaatcgtatttaaaagctagcttgggaagtagctgtacatagtcgtttttttcttttccttccaatagcggtgcggcattcaaattcctgaatggaatattaaggggaggcattgccattttaagaaagaaatcgaaatcaatattactatccgagaaataattcatagacattttttcatactccaagcgcaaacctgctgttactgaaaggcctttcacaaacaggtcgttgaatgtagattggtggtacagtgcggtgctgaataccggtgtgtcaaaacttccacttacgcggatacggttgttcaaaacgtccagactcatttcaggggtacggggattgtctaaatgaattttcttgaaagtattgttgatgtttccttcgatcatatcggtcactccgtcctccatgaagtttaccggaccggtggtatgtagccattgataaaaaccactgacccctgtaacccattgccagcgtttgttgtttttgcttttaaaagtaatctcttcactgatggtattcagacgctgcttctgctcaatggtataaatgctgacaggcaggaaatcctggtccataaacatacggtcgtttaaattctggaatcctgtaacagcgcttaagataaacttttgcgcctggtattcaatattcaaaccggtattgaacagtccacggcgataagtacaatcctgatcgtatgaaatcttccctatgtagtttttatatttttcattctctttgtcgtatccgtctatagctcctgtatagtaataagggtatcccccttcgtcattataatcatagcctatggtgaagtctagttttaagttttctgaaggcagccagatagcatgtattcgtccgcctcccgcttccatattatctacttttttcccattgagcgaattgcggaagaatccgtctgatccctcataataaccaccggcggagaaagcgaaacagtcactccaacggtggtaatgggttaatgaagcactgcggtagttactttttgttccataactcagttttacgtctgttccctgataggagaatggagagcgggtatgtaccttgattagtccccccatggtattgcgtccgtacaaggttccttgtggaccgcgaagaatatcaatacgttctatatcataaaaattgaaatcaaatgcagatttgtcaatgtaagggatattgtccacatacaaacctaccgcaggagtattgatacgcgatccgattccccggatgtaaatggctgaggtgagtcttgaaccatagtcgggcataaagaaattgggtaccagtgaactcacgttctttaaagtggtgatttggtttgcttgcatatctttttgggagagtaaagatacggctgtaggaagttcccttaattttccggtttctttaggtgaagcgataactaccacctcttctatatcaatgacttttgtagtgtccttaggcagcgtgttgatatcttcagcaaaagttgttgcagccagcaggcaggatgtaatgaataaaatgttttttctcatatttattgtttggttttatttgatacatcacggataaccagagttgctacaagtttctaccaggcggaaaatttatatattccactctgtataatccatgatggagaatgattccggctgcaaagtaacggtaaacctgatatgtgtgcaatcctaataaatgaggattttatattctgtctgcttcaatgtagccattcatcacagcataaacggtaagaccggaaacagacttgatgcccagtttttcagtaatgttcttgcggtgggagataacagtggtcaggctgatattaagtttgtcggctatctctttgttgataagtcctttggtgataagtatcaatacttctatttcccggacagacaattcatgttccgttttttctatgtgcattgctttatctgctgcttgttttcttgcctgatgtccatattggcgcaattgatggatgtcttttatcaaagaaccttcatcttggtagatattcagtttgggaacaccggataattgaggttggttgtcacctcctgctaatacaattgtttttggtttacgaagtaaaaagaaggaagtatgttcaaaatagatttgggcagagataaaataatgggcatacatgtccggtgtgtcatccgtcagctcaccaaaggaatggaatacacggatagtagccattggaatgatatcttccaaaatgttttttaaccccaggcaagtgagggtatttgggtctactatggctatttcgggatgatgcatgatgttttctttggtgcaaagatacatatcttttataaaaaacagattcataaagacaaagaaatcttcttttaggcaacatcaccaatcatttatttgtaggggcgcatttgaatgcgcccgcatatgtgctgtaaatcattttcggataggttcaatctgtccttactcctaaataagtggctgctgcttcagcacatttttctccatcgatacctgctgaaacaattcctccggcgtaacctgctccttctccacaaggaaataacccattgacagtgacatgttgcagtgtctcattatctcgcaggatccgtaccggagccgacgtgcgtgtttctacaccaatcatcactgcttcattggtcaggaagccatggctgctctttccgaattgttggaaacctttgctcaaacggtcggtaatgaatgcaggcatccaaaaatgcaggggagaggaaactaatcccggactatacgaactgtcgggtaaatcatagcttagttttttgcgggtgaagtccaccattcgttgtgaaggtgcggtttggcgcatattgccttgctgccagcaggaggcctccaatgcttcttggaaatacatcatggttaatggacaatggtcggtagtccattgaccatgatgtttattagtggcttttaattcttcacttttcgtttttaattcttctgtaaaaagattattttccgccagatcttccggcctgatttctaccaccatgccggagttgctccatttggagccgcggttgctgggactcatgccgtttactacaatctgatgcggaccgcttgcggcaggaacaacaaatcctcccggacacatacaaaaactatagacaccacgtccttctacttgtgtcacaaagctatattcagcggcaggcagatactttccacgtccgtttttattatgatattgtatttggtcaatcagcatggacgggtgttccaaacgtactcctactgcaattcctttggtttccatctctataccattgtcatacaaccaccgatacacatcccgtgcggaatgtccggtagccagaataacaggtcctttgaaagtctttccggtatttgtttctatacctgtgattttgtttttttctataataagggaatccattcgtgtttcgaaatgcacttcaccaccacattctatgatggtattccgcatattttcaatcacacgcggcaacttgtctgtaccgatgtggggatgggcatctgccaggatggaggtactggcgccatgttggcagaatacattcagaattttgttcacattccctcgctttttgcttcgggtatagagtttgccgtctgaataggctcctgctcctccttctccgaaactgtagttgctttcaggggcaactttgtgctcacggctgatacgggcgatatctatttttctatcgcgtacattcttacctcgttccactacgacaggccggagtcctaactctattaatcgcaaggcagcaaaaagtccgcccggtcctgctcccacgacaatgacttgtggtttcccatctaccttattatatatagtacgggtgaactcctcatcttgtggcatttcattaatatataggcgtactttcaaatttacatagatggtgcgttgacgtgcgtctatgctcctttttaagatgcgaagggcatggatggtacgtatatccaatcccttgtcatgtccgatgaactgtttcagtgactgttcgttggctgcttgttcaggcaagactcttatttgaaattcctgtatcatggttcttatttggattgttcgccttccggcattaattttttacggtaataagaattggcggtatatagtgcggcggcagggttgtgtcctgtcacacggtctttggtcactaaagttgtagtataggcattagagtacttgtagaataagctgtcatgtcccacacatagtccgataaccacgttcaactctgtatgtgcttggttgagaaggcgtgcttgtaggatagggttacacattgccgcaccgattttttcacattctttggggattccgatagaggatttggctattccggctactttgcagattactgaatatacctcaaagccgttagcacggaggatgcgggcaaaaatacgggcttcattcaccagcccgatacaataggctattcctagttttttatatcccatcttgcgtgcgaaagtcatgatttcttccacacgggttaatcggcagtaaccttcatattccacttcggcactggctgccattatcttgttgttgtcgttatattgtttcaacgcccattccaaatcttcttgttccaaatgggtagtcagacaaaattcagggtaagtgcgctctttgaacttgcagttctgtgtgccgcagtctatgcaggtcggggggtatgattgttcttttgtcattttatatcattattcaaattaagttttctcttatttatctcatccaaacaaagcccggaacgcttcttctaccttccttaccggaatgatttctatctttaattttgatgtatccattccttgcaaattatgtttcggtataagaatttgtttgaaacctaacttctctgcttctccgatgcgttgctcaatacggtttacaggtcggatctcaccactcagtcctacttcacccgccatgcaggtgtcacgttctatttccgtatccatattgctggatagaatggcactgatgacagacaggtcgatggccggatcattcactttcaatccacctgcgatattcaaaaagacatctttttgtgccagtttgaatcctacccgtttttcaagtactgccagaagcatgttcatacgtcgtaaatcaaatccggtggcagaacgttgcggattcccatatactgccgaactgactaaagcctgtgtttcaatcaagaaagggcggactccttctatggcagaggcgatagcaaccccgctcatcccgtcatggtcttggctaagcaacagttcggacgggttgctcacttggcgcaaaccgttttggcgcatttcataaatgcccagttcggcggtgcttccgaaacggttcttgatgctgcggagaatgcggtacatataatgttggtcaccttcaaattgcaatacggtgtctacaatatgttccagtaccttggggccggcaatgcttccttctttattgatatggccgatcagaatgaccggcgtatttgtttctttggcaaattttaaaatagaagcggaacattcacgtacctgtaccaaactgccgggagaagagtctatcgtttcggttgagatggtttgaatagagtcgatgatcactaaatcgggtcgtgtattcttgatatggacgtaaatctgctccaacgaagtttcacagactatcaggcagtcggaagaattatgcgggatacggtctgcacgcagttttaattgccgggcactctcttctcccgatatatacaatacttttttgtcaggcagatgaagtacggtttgcagcaccaaagtggatttgcctatccccggttcaccgcccagtagaacgagtgatcccggtactaaaccgcctcccaatacccggttcagttcttcgtcgtgcatatcaattcgaggttcgtcccctccggtaatgtcattcagtgtgacaggcttgctttttacggattccaggccggataccggtcttttgtttgcaggttccttgcgtataatttcttctacgtatgtgttccatgcaccgcaagacggacatttccctacccatttgggtgaatcctgcccacagttggtgcatacatatacagtcttttcctttgccatattcttacgggataattaaaacagcgcaacttgaggctgaatttgtacaaaggtaaggaaatagttctgcatatcaacatgggcaggataaaaaagttttgtcttatttctgctttaataaaaagcattcttatattttatcgcaaaaaaatgggaaattgtgatagattgtaggaaattgtttttatatttgcatcgttcaaataaaaaacagaagaagaacaataataaaatgacgatatactatctccatacaaccaccacattagggatggggcacatgacaactacaatgtccacatccacaacaatgacccctcggggttaaggatagtatatgtgtttctacgtgatacacgcttacggacgtaagcaaaacaagcttttaattttatttttttagtgtaaacagatacagtttcttttcgttgtcatgctgggtgaaacaaaagtagattctttaccggacttgaaatggctcggaggacagaatggcaaaagaagctggaataaaaatagataattgcatgaaagttatgaaattcggcgggacatccgtaggttccgtgaacagcattttaagcgtcaaacagatagtagaggcagttgaagagcccgtaattgtagttgtgtcggcattgggcggtataactgacaagttaatcaatacttcgcagatggctgccaatggggattccgcatacgagaaagaataccgtgaaattgtgaatcgtcacattgaaatggtatataccgtaattccggcaggtaatgagcgtactgttttattggataaggtcaatgaattgttgagtgaactgaaggatatttttcagggaatttatctgataaaggacttgtcgtctaaaacgtcggctactattgtaagttatggtgagcgcttgtcgtctattattgtagcttcgttgataaagggggctgtatggtatgactcccgcaacttcattaagactgaaaaaaaacatgccaaacatattctggattccgaactgaccactcgtttggttaaagagactttccagaaattaccggaagtggcattggttcccggatttatctctactgataagaacagtggtgaagtgaccaatttgggacgtggcggttcagattataccgcttctgtcatagctgcggcactgaatgcggatagcttggaaatatggacggatgtggatggtttcatgacggcagacccgcgtgtaatcagtacggcctataccattaatgagttgagctatgtggaagcgatggagctttgtaactttggagcgaaggtggtttatccgccgactatttatccggtatgtcataagaatattcctattctgattaagaatacattcaatcctcaaggcgagggaactatcataaagcaggaagtgaattccggttctaaagccattaaaggtatctcatccatcaatgatacgagtttgattacggttaccggtctgggaatggtgggagtgatcggagtgaatttccggatttttaaagcattggcacaaaacggcatcagcgtgtttatggtatcgcaggcatcttccgagaacagtacttctatcggtgtgcgtaatcaagatgcggcactggcttgtgaagtgctgaatgaggaattctccaaagaaatagaaatgggggaaatcagtccggttgttgccgaaatgaatttggctaccattgccattgtcggtgagaacatgaaacatacaccgggcatcgccggtaagctgttcgggactttaggccgtaacggcattagtgtgattgcttgtgctcaaggtgcttcggaaaccaatatctctttcgtggtagaatccaagtcactgcgcaaatcattgaatgtgattcatgattcgttcttcctgtccgaatatcaggtgctgaacctttttatctgcggtacaggtacggtaggaggcagtttgatagagcaaatccgttgtcagcaacaaaagttgatgcaggaacgcggtttgaagctgaaagtggtaggtatagccgatggacatcatgcgttgtttacccgtgcaggcgtagacctgtcacattataaggaagagttggcagagaaaggaatgccttcgtccacccaggtgttgcatgacgagattataggtatgaatatattcaactctgtgtttgtggattgtacagccagtgccgaggtggcgtctttatataaagatttcctgatgaataatatttcggtcgtagctgccaacaagattgccgcttcttccgaatactccgtttacagtgaactgaaacaaatagcccgccgccggggtgtgaaattcctgtttgaaaccaatgtcggtgcgggacttcctattatcaacacgatcaacgacttgataaacagcggagacaagatcttgaaaatagaggcggtattgagcggtacgctgaattacatctttaacaaaatcagcgcggacattcctttcagcaagaccatcaaaatggcacaggaagagcgctactcggaacccgatccgcgtattgacctgagtggcaaggatgtgattcgtaaactggttattctggctcgtgaagccggatataaattggaacaggaagatgtggaaaaacatctttttgtaccgaatgatttctttgaaggcccgttggaggagttctggaagaaagtaccttccctggatacggattttgaatcacgccgtcaaaagctggaggatgaaaacaaacgctggcgttttgtagccaaactggaagatgggaaaggcagtgtgtctttgcaggaagtggacagcaaacatccgttctatggtctggaaggcagcaacaacattattctgcttacaaccgagcgatataaagagtatccgatgatgatacaaggatatggggccggtgccagtgtgactgccgccggagtatttgccgatatcatgagcatcgctaatatttaggcttatgaaacatattattattttaggcgacggtatggccgactggcctgccgaatcactgggaaacaaaacattgctgcaatactccagtacaccttatatggataagttggccgctatgggacgtaccgggaggttggttacagttgctcccggatttcatccgggtagtgaagtggcgaatatgtctgttatgggctataatttaccgaaggtgtacgaaggccgtgggccgttggaagcagcaagcatcggggtggagttgcaaccgggcgatatggctatgcgttgtaacattatctgcatcgaagatgagaagataaaaaatcactccgccggacatatcactaccgaagaagctgatgtgctggttagatatttggaagaaaaattgggttctgaccggattcatttctataccggtgtacaatatcgccatttgttggtgataaaagggggaaataaacaattggactgcaccccgccccatgatgtgcctttgcagcctttccgtccgctcatggtgaaggcggaagtaccggaggcgcaggaaacagccggattgataaataatcttatcctggcttcccaggaattgttggcagatcatccggttaatcaaaaacgtatagccgaaggcaaagatcctgctaatagtatctggccttggagtccggggtatcgcccgcagatggaacctctctccgggaagtatccggccataaagaaaggggctgttatttcagcggtggacttaatcaatggcataggacattatgcaggattacgccgtattgctgtagagggggctaccggtttatataatacgaattatgagaataaggtggctgcggcattggaagcattgaagacggacgactttgtgtatctgcatattgaggccagtgatgaggccggtcacgaaggagattttaagttgaagcagtttactattgaaaatctggacaaacgtgttgtaagacctgtttatgaagcagtgaaggattgggatgagcctgtggctatcgccgtgcttccggatcatcctacgccttgcgaactccgtacccatacggccgaacctgtgcctttccttatctattatcccggtatagaaccggactgtgtgcagacctttgatgaagtggcatgtgtggaaggcagttatggaatattgaaagaagatgagtttatgaatgaatttatgaaaaaataatgtggcagtttgctaatttgccccaatggcaaccctccatgcaaagcccttggcacattagcacattgacgcattgaaaaattgtttactatgaaatattacagtacgaatcaccaggcttccgatgcttctctggaagaagctgtagtgaaggggctggcttctgacaaaggtttgtatatgcccgaggccatcaagccattgccgcaagagttttatgatcagattgagaatctgtcgtttcaggaaattgcttatcgcgtggccgatgctttcttcggtgaggatgttcctgctgaaacactgaagcagatcgtttatgatacattgagttttgatgttcctgccgtaaaggtaaaggataatatttactctttggaactgtttcatggtcccacattggcatttaaagatgtaggtggacgtttcatggcccgtttgttgggctacttcattaaaaaagaagggcaaaagcaggtgaatgtactggttgcgacttcgggggataccggtagtgctgtagccaatggcttcctcggagtggaaggtattcatgtgtatgtgctttatccgaaaggaaaagtcagtgaaattcaggaaaagcagttcactactctggggcggaatatcacagcgttagaagtggacggtacttttgatgactgtcaggcattggttaagaatgcgtttatggatgctgatttgaatgcgcacatgaagttgacttctgccaactccatcaatgtggctcgtttcctgccacaggcattttattacttctatgcctacgcacagttaaagaaagaaggaaaagcggatcatctggtagtgtgcgtacctagcggaaactttggtaatatcaccgccggactatttggtaaacgcatgggcttgcctgtcaagcgttttattgcagccaataaccggaatgatattttctaccaatacttacagaccggaaaatacaatcctcgcccttccatagctactattgccaatgcaatggatgtgggagatccaagtaattttgcccgtgtactggcattgtacggtaacagtcatgctgccataacagcggatatctctggtgcgacttatacggatgaacagattcgtgaaacggtgggtgaggtatattgggaaaccggttacttgctcgatccgcatggagcctgcggttatcgtgctttatccgaaggattgtccgccagcgaaacgggtattttcctggaaacggcacatccggctaaattcctggaaactgtggaaggtatcattggagacaaagtggagattcccgccaaactgcaagcgtttatgaaaggaaccaaacaaagtgttccgatggaaaaagactttgaaagtttcaaaggctatttgatgaaagaatagcttttagaaatagatatctgataagaaaagagggggcaaaagtccaaagtaactatccaatggttcaccgtaggggcggattgaatagttactttgggcttgtttacataaagaacaaaaaagttccgtcacagcaacgtgctcattactagttgctttctgtgtaaaagattctcaaatctccttcaatcggtatgcttccggctatcgaatcctgttacgtatgtaacaaaagtttgttcctaccgtatctttcactccgtttcatttgatatttcacttgggtgaagcaactgtttcacttaggcgaaaacggctgttcacctaagtgaaatcgcctcttcactcgggtgaagcaacaaatgcagatgggcaaaaatacgccttatgacgctctcctgcaaggaagtaaccgcaactatggcacaggaattagaacaaccgatatacgtcaagccgaatcgcggagacgcttacgaatttgatagcggagaatggaaaaccgtttcaggggaatttagaatgttttttcacattatattgttgatttacagagagatactgcgcgtaatccggaatggttgatgcgtgtctttattttatttcttccagcaacttcccgaacgaagtgaatgtccgttgtttcccgccccaggtgaggtacaaggtatcgggagcgatgacttgtagatggggcagaccggcaggagcgttttgggtttgcagacaagtatatccgtgacggttcagtgcgttgatagtccagtgcaataaggtttcgtctgtcgcttccaccgttatttcctgctttccattcacggttggatagtagatgccatgatcataatcgaaccggatattactgtgtgagaacagcgtgtccatccgatggttcagaatcatatcttccgttactccgcattgcagtcctgtttctttggacagcagccaaagtttgtccgacagtaccagggcttgttctatgtcatgggtggatagcaggatggccttgttttgctccaccgccagctgatgcagcaaagtcatgatttctatgcggctcaccacgtccagaaaagcggtcggctcatccaagatgataagcggacattcctgaaccaatgctttggctatcattaccttttgccgttctccgtccgaaagttcggcggtgtagctttcggctttgtgggcaatgcctacggcatccaatgcctctttgataatgagatggtctttgggatggagccgtccgaagaagcctgtatgcggctggcgtcccaaagctaccagttcatacacggtcagccctccggcttgtgtcttgtctgtcaggactacaccgatggtgcgcgaacgttctttttccgaatactgctgcaaaggcttgcccagcaattgcaaatctcctgccagtgaaggttgcgaagcggacagggtgcggagcaaagtcgactttccggccccgtttgctccaagcagactggtcagttctcccggatagagcccgaaagaaaggtgttcgtgcactttcttttctcctttgtgggtacgataacctatgcacaggtctgtggcggtgatgacagcttgcttttccatcagttgaagtactggattttacgttggttcacaatgacataaataataatgggtgcaccaatgaccggagtgacggcattcagcggaatgatacctgcttcgcccggcagaatgcagatgaagttgcagagcagggcaatggctcctcccgtcagcatggtgacaggtagcagagaattatggttggaggttcccagcatgaggcgggcaatgtgcggcacggccagtccgataaaggaaatcgggccgcagaaagcggtggtcgtcgctgtcagtaatccggtggcgacaagcagcaggttacgtgtacggcggatgttgattcccaggttttcggcatagcgtgttcccagcagcagggcattcagaggctttatcagcagtatggtaatcagcagtcccgccgctgtgaccaaggagaaaaagggaagctgctgcaaagatactcctccaaagtttcccattccccaaatcatgtaggaatgcaccccttctgccgtggagaaaaagttgagcagggagatggcagatgaagtgatataccctatcatgatacctataatgagcagcatgatgctgttttttatcaaagtggagaagaacaggatgattcccatcaccagcatggagcctatgaatgctccgataatgacggacaggaatccggataaagtgaatactccggcagtaatcgtacctgcgcctgccagcatgaccaaggcaactcccaaactggctcccgaactgatgcccagtatggaagggtcggccaaaggattattgaatgtggtttgcaacatcagtcccgatgctgcgagtgccattccgcaaaggagggcggtaatggcttgcggcaggcgggattcccagactatgaaactccaactcgccttttctacttcattgcctgtaaggatatgccacaccgcctcggcagggatgtttaccgagccgaacaacaggttggctcctgtcaatgcaaggatgaggaggagcagtatgataccgtattttgttcctttgttattcattgatactgtttggggttacgcccactgtagggagtgtgtcaaaactaacccggcctatcccatcgtcagctgtaggggcagcattatccacgttttgacataaccctacggtgatttactccgctaatttagtgaaatattttaattcatacccttctaaaagcgtaggatggaatatttttatcaaatctttcagtaatcggtcgggatggaaaggggaatcttcgtaaaagtctaccttccctgtgttgcatccataaatgttgcgttccttgaatgcacggaaaccggtgtatggagcatagtcctgctccaattccttataagtcttgtcaatggcctgattatatttgatgagccagaaatctgcattctgacctttgtcaaacacggtttcgaaggctaggggaacagaaccgctatgctcgtcatcggcaaacacataattggctccggcatccgcatagatgcgtgcagaggtgcttttacctcccggaacataccaagccgaaccgtttttcagttcgctgataacgctcggtgcagatgaaaggggagcaaccaatgctttcagctcattatagtttttttccacctcggcaaacaaactgtccgctttttgtgcctcaccgaacagaaggccgtagaagcgcatccattcggcacgtcccaatgccgaagtttccatgtagtctgcacattcgataatggggatgttgagtttttccacccgtccgtatccgccactgttctcgaaaggggagagcataatggcatcggggtgcaggtcgattatcttttctatatccgggttcattccattccctacatcggcgatgcttcctgtgcggcagccatcctgcacttcttgcagtttgatatacttcaaatcgcagactcctccaatacttttcaaagcaccaatctggttgagcaatccgcaatgtacggatgagtaaacaacggccttgctcaatggcgtgcggacaagtgtcccttccggcaagtcggcaggcagggacttttctttgtcaaccaagacataggtatgcagtatccgggtcgtatcccatggattgcgcagacgggcaatggtatagtcttcggttgcagacagattgaggttttctgcataacgcaaagggattgctttttctgcttctattacagaagcagtcttgcttcttccgccgcaggaggaaaaaagcaagactgaaagcatcaggtgaataaagagagaaaattgtttcattggttagtcaataaatacggctgctctaggacttacaccaccgctctcgaatttttcaataaaagtaccgtctttcttgaaacgatatatatctccgttagtattataatcggtagtaccgacataaaaatctccattttcaggattgatactcaacatataaaagatacgagtcttgagttcttctggcatttgtaaaaaactagtttcttcttttttgttggttttagcattataagaatataatgtatggttggatgtatttgtattatagtctgtttctgaatagataacatataccacatcattatattcagccattaatgtgcccggtccaatttttttgtaggttttgttttctttgtcatagattgctacagtatagtcataatcagggtacggaccaccatatccttggatgaaaattttgtcattagcttctagtatcctatccggattctggaaaatttccacatgctctgctgtatcaaaagtcttgatatcaatgatagacaaacgattgtcatatccgaaaccggagtttaccagatatagtttgccatcttcttcaataatatgctcgggattttgtcctacagctaccatcttttcaaaagttaatgtgttagcatccaaacgggctacattaccactgcttaaagtaacgtaaagttttccgtcttcagcagccatatagcgaggctgtccttgctcgtctgtaaagctataacgcgcttgttctacacaagcttcattcagtttgcatacatatttagagccatacatggatacataaatattattattatattttatcatatcttgtcctgtatctcctagtttggcttcattttgcttatagaaaatgtcatctattacattgtttcttttatcgggatcatagtatgtgatgccggcattgttcttttgataagaaccttcattcaaaatgtagacacgattttcaggcaattccaccttcgaaccttcatcgttttttttgctgtcatcgtcatcatcactacatgaggtgaatgaaacacccagcattaacatacacagtgttccaaaaaataagcttcttagtttcataattaatttttaaaagttagacatttatattgtttaaaatcttaatactcccgttatgcgccaggaacgtccgggcatgggataatatttgataacatcatattgcttgtcagtgagattgataacttctgcctgaaggcggaggtgacagcctttcattgtaaattcccgccataaagtggctgtgtgttctacataaccgtctatcttattcaccggtatattctgtgccatatagtagcgttcgctgacccctgtcaggctgtaacccacattaatccaaggagtttcgatggtggtcgaagcattgccgctatgctgaggcgtatagggcagctggtctttataattcttggcatcgggatttgtcatatctatggctttttgccaggaataattgccgcttaatcctacgtttatgttagggcagacaggtatggaagtagccattgtcgcatcaaggccggtgatatgtaccgtgccgtaattctgcattttccatacataagtactgggaaaggcgactattttatcggttacttcattataatatccgtcaagagtgatagaaaggaaatcggtaaacgaaaacggcttgccgttccaagtgacacctatattgtattcgcgtgccttttccgggcgtaaggaggtatttcctatgcgtagataataaaggtcattgaaggtaggtacgcggaacgtattcttatacattgcgcggacgtataattgttcttctttccatggctgaatggaaacggacagggtgggcgacaggcgtttccggtcgtcgggagtattccctgcttttacttcttccgtaatgaaagtccccaccaatgtgcccgatagcttgatacgtccccattggtaacgtgcattgagggctgtgagcgaggaatatctcaccgggttggggctgtcgttgatattggtgtgaagggtattgatgaatccatcctgcgcgagcgataattccagacctttgacgggctgataaagcacggcggcggacagataatattcgtcctgacggttgatgtcggtctgctttccgttttcatacttcacgtctgtatcttcgtatttgttccaagaatggttgaacttggcttgcgcctgcaaagtccatttgggggagaaggttttcttataacgggcttgggtgaagaaattctcgtcccacaaacgttcttctgccttcgggttgtatagaatgacagcaccgggcagtccgcgttcggaataaaaataataggctttcacatccagtgtactttcgtcatggaaagtatgaaacagattcgcctctccctgccatgtatgaatatccgaattgtttcttttctcttgagtgatgtattttccgttttccaatgtgaagggataattaccgtcggcacgtataaaggaagcatcgactgacagaccggtgtgttctcccagcttctgccatctgcgtatggatggggctatgtagccaaaggctcctccccggatttgtatttgtgacagggaggatttcccattttcgaagacgggtttctccgtttcaatgctgagtactcctgccgaagcatacagacgggccggttgcagcagattctcatcttgtccgattgccaatgaaagagaggatacattgtcgagggagaaacgcccgatatcgatttgtcctgcctgactgttgctgacgactactccatcgtagctgactgctgtgtgtgcagctcctaaattgcggatggaaacggtcttcagaccgcctatgcctccgtaatcacggacgttggttccggcaaaacgccttacggcatctgccatattctgtaaccccaagttctttatatcttccttgttgataagttgtacagggctgccggttgttactttggcaggcggacgtcttgccgtaaccgtaacttcatctattttatgcacttttccggtgatggaatctcctttctcctgtgcctgtatttcaagcggcaataggagaaagctgcaaagcagacaaagccatagcttataagcctggttatttcctttcatttaaaaaaacatattaatgaataaataccgcattcttaccgctgctctttcctcgaaagcgacggtcgatgactttacgttttgcaggtcttctgacttactcctgtttacttgccttcccaccttattatatatacaggcagtggcgtgagtggataagtaaacctatccccttatagaggtagatggagcttacagcagcgggactgttcaggacttgcacctgattcccttttcatccgcttcctcgcatcagtcggaggtacgcggaacaaaacatggcaaagatagtttgtttggatgaataagaaaaggaaaatgataaaaaatcctttttttaattagttacagatttattttctcccagcaaaagtaggcgtgtataacggttctttttttagtgacaaaacgacttgattctatccatgttgaagataaaatagaatagtattgaataaaataaaactgatgcttaacaacattcaaatattgattcgctttattcaatacaatcactatatttgttaaatggataatcttaaaatacgtaatagatgaaacacttgaattttattttagccggtttatttttcctgtgcggtctttgttgtcgggcacaagtgcttcctttggaagaaaatgtggtgctgaacaccaaggaaggacaaatcaaaggaaaactgcttttgcccggtggggtgaaaacctgtccggtggtgcttattatagccggctccggacctacggatatggatggtaattcagccattggcaatttgaggaataattcgttgaagtttctggcggaaggcttggcggcaaacggcatcgcttccttgcgctttgacaagcgggggataggaaccagtgcgtcggcaggtaaggaggaagcgaaacttcgttttgaagattatgtgaatgatgtgacgggctggattgattacctggcgaaagagaaacgttttacgacaatcacggtggcaggacatagcgaaggggcgctgattggaatgctggcctgtcagaaccggccgaaggtgaaaggctatatctcggttgccggtgcggggcgtcctgcctacgagattatagaggcgcaagtggctgctcaacagaatccggaagcggtgcggaaggaggtggcatccattaacgggtccttgaaaaacggcaaggaagtgagtgacgtgccggcttatctgcaatcattgtatcgggcttctgtccagccttatttgatttcctggttcaagtataatccccggacggtgattgcttccgtcaaagtgccggtcctcatcgttcagggtaaaaatgatattcaggtatcggtggaggatgccgaacttctgaaaaagggttgcccggctgccgaactgcttttgattgataagatgaaccatgtgctgaaagattgtgaatcaaaggccgtacagcagcagatgcttacttacgggaatccttctctgccggtgaacagtactttgatagcttctgtcagtacatttgtgaaaaaactgaaatgatatgggagaaataaagaaacgtttgccgttgcaatgccctgcgtgtgatgcaccgttgagggagactcatttcggtccggcacccaatcctgtctggtgtgttatgcggcagagcatctgatggtgtggctgttgtgtcgtatgttgataagccatctttatggataaaataaaaaagaggatgccaaaagtcttgttgaagctttgacatcctcttctatgttatactgatgcgttatttaatcttttctcgaatcttgctaagataggcacgcatccccgcagcatctttcttgttgatgatatccaacagctcatttaattctgtacggataccttctacctgtgcaggggtgcggggattgaataaaatttcctgcaacaggtagtcgtcttcgttcaatactcctttggctatcttcatgtggcgtttgaaagtagtaccgggagcgtcctgatgcttcatcactgccgcaaaaacgaaagtggagacaaaagggatggacagcgaataggccactgtctcatcgtgctcttcaaaggtatattcaaagatgttcagaccaaggttttggtataagtccttgaagaagattttacccagatggtcgccttcgctgatgatgatggcattttcggtgctcagtttgtcaaggttggcaaatgtgggaccgaacatggggtgggtagatacataacggaatccgcattggtcataaaactctttcagtccggtctttaccgaggcaatatcgctgatgatgcaatccttggggagagcgggcaatacttggtgaaaagcatccagcgtatatttcacggttgccgcattgataaccagttcgggtttgaattcttcaatctcttcgagtgtggtatatcggtaggtattgtaaacgaaacgaaggcgtttcgggtctacatcaaatacagcggtttcgtgctggaagctcaatacatcggtaaagaaggagcccattttaccggctcctaaaattaatattctcatcggtttacttatttatgatttccatttgttgccttacgctttcttcgtgaatggcttcgaatacttttttaatgaattctgaatccatgccgcacaatgaaccttgtgcaccgcgcttgtccagaatctcattgtaacgacctgtctgtagaatggtcatatcatgttctttcttgaatgtaccgatttcacggcagacacgcatacgttttgccaatacttcgataatctcattgtcgcaatcatcgatttggttacgcagttcacccagattttcagttgtttgggtttctttgcggatgaccagcagatttagaatgtagtccagcacatcgggagtgacttgttgggcggcatcgctccatgcacagtcgggattgcagtgtgattctacgattaagccgtcaaaacctaagtccatcgcctgctggcagaggggagctaccaactcgcgcttgccaccgatatggctggggtcacagaaaataggcagttcaggaatgcggcggcgcaattcgatagggatatgccattggggtaggttacggtaaatctttttatcataagaagagaatccgcgatggatagcacccagttgcttcaaacctgcattgttgatgcgctcgaaagctccaatccacaattcaaggtcagggttgacagggtttttaatcaatataggaatatccacacctttcagtgcatcggcaatttcctgcacggcaaacggattggcagtggtgcgtgcgccaatccaaagcacatcaatacctgcctttaaacattcgtaaacgtgtttggcagtagctacttcggtggcaacatacataccggtttcctgtttcacacgtttcagccatgccaggccgtctacaccgatgccttcgaaacctcccggtttggtacgcggtttccagatgccggcacggaaaatcttaatgcctttattggccagcatagtggcggtatccattacttgttcttcggtttcggcactacatgggccggcgataatcatcgggcgtttcttttcaattcccggaagttcgatgggttttaaatctaattccataatctgatattttgttacattatctttttaattctttccagtgcttctgccagcttttcttctttggcacagagggaaatacggatatagcgtttgccgttgctgccgaagataaagcccggagtaatgaacacacgtgcttcgtgcaaaactttttcggtcagttcttctacatcattgtaagattcgggaatgcgtccccaaaggaacatacctacctgattagggtcaaagctacaaccgagtactttcataatctcttctgccagttggcggcgacggctatatacattgacgttcgcttcttcgtgccattccacactgttgttgtaagcttgtgcggcggccagttgcatggggcggaaagttcctgagtcaatattactctttattttcaatatccattgtacaaactgcgcattggtggcgagcattcccacacgccagccgggcatgttgtggctcttgctcatagagttgaactcgatgcagcattctttggctccgggcacattaagaatactcagtggtttcttgttcaggataaagctgtatgggttgtcgtttacaatcacaatattatggcggcgtgcaaagtttaccagcttttcatacagttccatcgtggcgttcgctccggtcggcatattgggatagttggtccacataatcttgacgcggctcaagtccatcttctccagttcatcaaaatcgggttgccaatggttgtcttcgcgcaggttgtagttcacaatctcactgcctaatattttatttaaagaggtgtaggtaggataccccggattgggaaccaatacctgatcacccggattgaccaatgccagcgtcacatgcaggataccttctttggaaccgatgagcggctggatttcggttgccggatcaagctctacatgataccaacgcttgtaccagtcggccatggctttgcgtaattcaggaatgccgacagtaggttggtatccgtgcgcatcaggacgctttgcctgttcgcacaacacattgacggtttcttccgaagggggcatgtcagggcttccgatacccaaactgattacattcttaccttcggcattcatttgtgccacttctttcagtttacggctgaagtagtattcgctaacattcgccagacggtctgccggctgaatattatatggttgatgttccttctgcatattctcctaatattttaagttcttttgtcaatggtgaaacggcgtcgatagactgcttgtatcttaaataatcattgaaaattacgtctacatagaacagatattcccattcgcggcctataatcggtaatgattgaatcttggtcagatttattttatagaaagaaaagatagagagcacttgcgacaggcttccttcgttgtgggggagggagaagacgatgttggccttgtttactttcgaacgttcacgtaagtcatcggctttccatgggtcggccactacaaggaaacgcgtgaagttgtgtttgtttgtttcgatgccttcttccaatactttcattccgtacaaatcggcggcgtatctggagcagatagcggcgtgtcctttcagattttcccgtttgatggcttccgcacttcctgccgtatcttccgtttctactattttcagtttgggatgttgtatcaggaattcacggcattgtgccaaggcaacggggtgggagttgacttctgtcagtgtttcccaattgtcgtccggcaagcacatgaagctgtgtttgatgcgtagtttgtgttcgccgacaatggtcatgccgctttcgcgcagtaactcatagttgtgcagcaaactgcctgcaatggtgttctcgatagcgagcataccaattacattgctatcctgctttatgttcgcaaagacttcttcgaacgtggaacagcagattagttcgatctcttctccggggaagaacttgtgggcggcaatgtcgtgatacgagcccggtacaccttgtattgctatctttttcattcgtatatatattataaaaaaatcccgcttctgccggaagcgggatttcgttgttattatcgcattgttttaatcattgtttaacgtacacatacaaactcccgcttcactttgttgctaaagtaaaagtaataaaagaagaaaaagtatgtattgtataatgctttcattttgttcttattgttattgaatacgctgcaaaagtaatatatttctagtaaaaacaaataaataagaagctttttttcaatttttttttaggcagtgcctgtttggctcctgctttccataattcccggcatctgttgtaaagcccaatctactaatccttctatatgtggtattaagcttttccctctttctgtcagttcatattctactcgcggcggaacttcggcatacaccttccggctcactagtccgtcagtttccagtgtgcgcagagttacagtcagcatacgttgtgagatatcggctattgttttatgaatgtcgcagaatcgcatggttccgttagcatttaatgtgataagaaccagcatagaccatttatcaccaagcctgcacaatacattccgtacagggcaattattatccggatgaaaatttttcattttttaatattctctatttgcttgccgttcaacaatggttacctctatgtaagttccttatctacaggtgccttcttgtttttggaaagaaggatacttacatttgcattacaaaagtaataaacttactaaagataactattgttctactagataaatttattgtttcacttataataagttaagattatggcaaagaaagtagctgttttagcggtaaatccggtgaacggattcggtttgttccagtatttggaagcgttttttgaaaatggtatatcctataaggtgtatgcagtggcggaaacaaaggaaattaaaacaaactcgggcattgaattggtggccgatgatgtgattgcaaatcttatagggcatgaagatgattttgatgctttggtttttgcctgtggggatgcggttcccgtatttgctcaaaatgcggataaaccttataatgtggacttgatgtcggtcttgaaggcatttgccgggaagggaaagatcctgataggtcattgtgctgcaggtctgttgtttgattttgctggaataacagagggaaagagattagctgtgcatcctttggcaaaaccggctgtaagtaaaggaatggctactgatgaaaaatcggttgttgatggtaatttttatacagcacaaagtgaaaactttgtttggacaatgatgcctcaggtaattgaagccttgaaaaaataagggaatattaatgtcgcccaatgtagaaatttcctatatttgggcgacaattcctaaaaatagaaacaatgaaatacaattttgataaagtgatagatcgcagcggtacgtctgctgagaaagtagaagggctgaaacatatttggggacgtacggatttgattcctttatgggtggctgatatggattttgccacagctccttttgtaacagatgctattcgtaaacgttgcgaaaatgaagttttagggtataccggcaaaccagatagctattataatgcgattataaactgggtaaaacagcgttatgatttgatcgtgaccaaggaagtgataaattttgttcccggcattgtaccgggcatcggtatggctatgaattgttttactcagaaaggggataaggtaatgattcaacctcctgtttatcatccttttgcatgggttactactcgtaatgagcgtactttggtcataaatccgttgaaatgggagaacgggatgtaccgtatggatttggatgcttttcgtgaacaaattaaaggttgtaagctctttattttatgtaatcctcataatccgggtggcgttgtgtggactgaagcagagttacgagcgatagctgatatctgttatgatgagaaagtattggtcttctcggatgaaattcatgcggatttgactttacctcctcatacgcatcgtccttttgctactgtcagtgaaaaggctcgaatgaactctgttacttttatgtctcctagcaaggcttttaatatgccgggactatctgcctcacatgctcttatttttaatgaagatttgcgtaaacgcttccgtatctatatggatgccggtgagttggatatgggacatgtctttgcttttctttctgttgaggctgcttatagtcatggtacggaatggcttgaccaatgtttggcgtatatacaaggaaatatagattttgtcgacgaatttttgaaaaaacatgcacctaaaatcaaggccattcgtccggaggcttcttatttagtttggttggattgccgtgaactggagttgagccagaaagatttgaatgaattctttgtagataaagcgcatttggcattgaatgacggggaaatgtttggtaaggaaggcattggctttatgcgtttaaacgtggcaagtccgcgttgtatcattgaaaaggcgatgaaacaactggcggatgcttatcaactatatataaagtgattattttaagtattgtgtcttaaagatattcacgcataaaatgaagatggataataataacggtccgaatatgacacccatgaatccgaataaggaaagtccgatgaccactccaaaaatggtgatgagtggatgggtgtctgccatcttcttttgcagaataaaacgaattagattgtcaatgtttgttacaattaatccacaataaagaagtagtccgacggcatgtgtccaatctcctgaaagagcaagataggcggctagcgggaaccataccaatgctgttcctacaataggaatgacggtggcaaagcaggtcaggaagccaaacaatagcgcgctgggtacatcaaacaaatagtagcctaatgtagctattcctccttgaatgactgccagtaagggaatacctattgcattacttctgacaatcatattaatttctttcagtacattttttttgtttgtatcgctgaaaggaagtaactcatagatgtatttttccatttgaattccgccaatcagcatgaagtagagaataaagaccaatacgaaagcattaacggcaaagctactgatacttcccatcagaaactgtccgatggcaggaagaatggaggctatggatgaaatgttttctgcgcttagtaagtcatatcccgtcttggtatgaagccaatcggcaagattggttaccgtatggataaaacctgtcgtatctacgtttaccgtctgtaatttattgatcagtaaccatacagccaatgataaaggtacaagaaagcacatgatggcttctatcaagagtaaaatggctgtaatactttttttgaaatgtttttcttgggtaagataaaacatttgttttcttaccatgatgtaaatggtgcatgctcctaaaatacctcctatgaaaggagacatttttataaataaaataagtcctaatcccagtataatggtgataagggaatatttccaatactgttcttttacgctcatgtgttttttgcttattttgtatataaataaacaataaaacgaattgaaatgttccgcttttaaaacggaacattcttagtcatgttttcataattattgtattgaccgctaatattcatttcattttcaggagccagttctattgctttcttcatatcttccacagatccgtctttgtctcctttaagtaatttgatacgtcctcgttcatgatatgctttggcaaagttgggattgatttcaatggcttcatcatatacagccaatgctttgtcaaaatctttgtttaccagatatagttctcctgacaggatataggccttttcattgaacggattgagtgacaatacttgattaaaacattcttgtgcttgttccggttcattggtggcggctagaatttctcctttcaaaagcaaggcttgttcgtcgtcgggattgaggctgagcaacttttgtatatcttcggcagcatcttttgcttgtttcattttccaaagtacttcagcgcgtagctggtatgcttcggtataatcttcttttaatacgatagctttagtcagcatagcgatggcggtgatatcatctttcatgccgatagctgcttttgctgtcaaatagaaagatagggggttcttattatctaaaaccaaagctttttggcaggcatccttcatattttcgtaatcttcctgcatatagcagatgccagctagtgaaaggaaggtgtttacttgttcaggatcttttgtagccatgcggtctagtgtgatacgggcatcatctagtcggtttgcctgtgtataagcagtggctagcaggctgagtgtttccaattcatcgttgatggcaactgcttcttcaaaacatttaatggcataaggtagtttacccatacgttgggcgcggatgccgtcgtattttaaaatctcgaagttctttttatcatttttctctttttcggtttcgggggtgttgtttccgccgaataaggatttaaataagcccataatttatagttgttttatttgtctattgttataataaatcgtctgaggtaaatttcttgttcctgatgctgcatgttggtaaaacgtactgcctttattggtttctgttgtaaactggcagtcagtcggttgttttcttgtgtaaagtgtactttactccagtcttttccatttgcagatatctcaagacttccccaagtttcgatttccggtttcccgaaatctatctctatattttctccgggataaacttgatccagttcgatagtcaatgaaccattaccgggccatctgataacttccagcgccggagaaatctgaatgcggtttatctttacctgtaaaggtaagttctttatctgactgatatcgcttattagtttatgcggcatatagtcggtttcagcattcagcagtgtgctatatttttggttatagcattgcgtgacggtggcgaaagtttgatcaatcaatggcttgattactcttcctgctgtctttatacccggctggtaagggttttggttgtatgtctggtcaatttgaaacatttgttgttgcaaggctttcacgtgtttgtatttacgcataaataaagattggtcatttttgtcgtatgctttgaccattgccagtacttcatttccggtttcacccaatagtttgaactgataaagccaaggcatgatttctactataatcggatttttatcagcatgggcgactaaaatatcacttgattcaaccatctggctgaaggtttcttgtagaatagagaagtctttttcagtgtaagttttattttttatgtaactttcagtaaagctctgcgctgtgggttggagatttacagattcctctcggcgatatttatgtccgttggggcccaagtccgaattatgggcggcaaagaattccagttcagtggcagcatcgggcaaaatgttcataatagcgtctttccaagttttttcactgttatattttgttggattccaagcgtatgaggctacactataaatggctattttagaagcctcggcatgttccatcggattagttacaaagccagacatctgattggctatttgagtatcgtttccatatactggtcccatgagcagatgatctctaacgtaatcggaaacaggaaagttccaccatatatatgccggacgtttaatccgttcgtttatccattgaataccatcttgggtaatatcggaaataacccggtctcctgtccacataatttgtatggatggattcagtttgtctcctaaagtagtaagatatcctttagcagggtcggaccaacttttattgtattctgtaggacacatgataaggggagttacatccggttttacttttacaaaatgttcatctatgtaattcagcagttctgcttgtttcacagggttggtaccttctcctgaaatatcatcaaagaagacggcaaaagaacggacaccgagatgatacatcttttcaaattttgccaataataattcacggtcttctttattccatttgatgtcttgtcccggatggatagcccaaacaaaatcgacttcgttttcttgagctacttttactaattcctgtaattgttttgcttctttttcggggtaaggcagacgccagttgggagaactatggtaagggtcatctttagggccgtatatataggtgttcattttgttttcaccataaaattgaagttggcgaagacgggcattatggctccagggggtcccgtaaaatccttctacgacaccacggtagcgtatggccggatagtcttgtatctctattaccggtaattggttatctttgagcaattgttttaaggtttgcaaggcatagtaggttccacgttcatcgtttcctgccagaattatttccttattattgatggatagataataaccttccttttggttggggatctgacgagtaaacttgcggatggacttgtctcctttttctcctatataaatgcgtaaaccggtattggccgggtgttttccacctaataaatcttttaattcttgtacggcatatggattggcttcagtttctcccaagagttggtaagtttcaggtaaattgatttgtccgtcttgtttggaaacttgttgagggatgggctgtacttctatgttttgggcaaagatagtacaaccggtaaaaagacaaatgattgccaaatgcatttttttcatgttctgttggggtaaaaggttaataaatcaatggcaaagatacgatttatacagaaagaattccatcttttaattgtattatttcttcggaaagtaggtaggagagtaccttttccgctttttcacgattgctattcaattggttcagtagttctgaagcaggcatggcacctgcctgcaatagctgtttgatttgttgttccaattcttgaaattctccctgttttattcctgaatgatggttgttaagacatacatcacattgtccgcagttgtgctcgttcttttctccgaaatatctgagtagcattcggctacgacatttatcatcggctgtggcatattctatcatagccttgattcgggtggtatagctttttttccggtcttcgtatatttcccgagttagggcaaggcgattcttttcttgccgttcacgggtatatataatataaggtgtctttttccgtggaatgtaatgtatgatatgtctacgagtcagcgccagtagaatttcatagattcgttggcgggttaatccggagcggattactaaggaatcttcgttaatataggcataatcagtaaatagtcctgtataagaacgcaagatgatgtttatcagtttctctgtatctgtatcattctcgtgtagtttatagagttcgtcgcgtttcatcgtgaaaagaatacgtgaagcattatcttgctcgtctgtatattctaaatatccggcacgggtcagaatctttaaagcgctgtcggcttgtacggggaaatgtttgaagttacgacagaattcatccaagttaaaagcaaaggtgcaacccataccgtctcccatggccatttgaaaatagtagttgatatcttcgtacacttttcggatataatccttgtcgggaaatgtatcactgatacgtttgttgagggtggttttatcactttgggcgtatagcaggacagcatatgctttctgcccgtcgcgccctgctcgtccggcttcttgaaaataggcttcaggagaatcaggcatatctatgtggataacgatacgtacatctggtttgtcgatacccattccgaaggcgttggttgctaccatagtacggctttctccggtgagccagcttttttgacgttgatcttttacatcattattcaaaccggcatgatagaaagtggcagttatgccgttattgaccagtagttcggcaatttcacgtgtacgtttccggttgcgggtatagacaatggcgcagccgggcacactatttaaaatatgtaatagctcttcctgtttattttctgtaggacgtacaatgtaagccaagttttttctttcgaaactcattcggaaaacctgactgtcttttttaaagtttagctttgtttgaatatctgttactacttccggagtggcagttgctgtcagtgccaatacaggtatgtcgggaaggagttcgcgaatttctgcaattttcagataagcagggcggaaatcatatccccattgagagatacagtgtgactcatctaccgtgatcatgcttaccttcatgttccgtagtttgctacggaatatttcagtatccagcctttccggagaaatataaaggaatttatagtcgccgaagatacagttttccaatgcaacaatgatctcttcgcgtgtcatgcctgaataaactgccaaagctttgatacctcggtcgcgtaaattgcgtacttggtccttcatcagggcaataagaggtgtaataaccaaacataatccgggttgtgctaaagctggtacttggaaggtaatggatttgccgccaccggtaggcatcaatcctagcgtgtcgtgaccgttgcctatactttcaatgatttctttctgtatgccccgaaagtcatcatatccccaatattgttttagaatttctttataggtcattggaagggaaataagaaaattatgtcaaaactccaatgacttatcatcttattattctgataagtgtctgataacgtcattaaagttttgacatatttcaaagataaatctttatcattattcctcactgggttttatatcttctatttgcaattgtacttcaccacgtttgtgcgtattctcttcaatggtataacaaatatcaaaagaacgtttggtcttgatatagcgtgcttgtgaactttgtccgaaagcgatgccattcatcacattgtttgatttattgtctaccaattccaacttgatgtgttcctgatcacgccctactactttgctggttccataatcatatacattatgtgtacaaaagattggtttgtggttgtccggtccgaagggattgaactttttcaggtcggcatggaacttcggagtgatatcccggaagtcaatttctgcatcaatatcaattacagcactggtctgttccggcaaaatatgttctgtgacataggtttcaaaacgacgggtgaattcttccacattttccactttcatggatagtcctgcagcataagtgtgtcctccaaagttttccaacaagtcacgacaatgttcgatagctttgtagacatcgaaacctgatacggaacgggcggaaccagttgccagattatctgtacgggttaatacaactgccgggcggtaataaatctctgtaaggcgtgaggctacgataccgataacacctttatgccacgcttcattatagatgacaatggaacgccggtctgctagtccttccaagtggtctacaatttggttggcctcttcggtcatggtcttatccagatctttacgggtttcattgtattggttgatttggttggctttctccaatgctgccgagaagtccttttctatgagcagttccaccgcctcttttccgttctgtatacgtccggatgcgttgatgcgcggacctatcttgaatacgatatcacctacggtaatttctttttctgataatccgcatacatcgataatagctttcagacctacactgggattggaattcaactgctttaagccgtggtgtgtcagcactcggttctctcccatgataggtacgatgtctgatgctacactgacagcaaccaaatctaataaaggagttagttgatgaaattcaatgccattattcaaagcgaaagcctgcatgaacttgaagcctacaccacatcccgaaagatgatcgtaaggatatgtattgtcagcccgtttggcattcagaatagctacggctggtggcaatatatcatcaggcacatggtggtcacagatgatgaaatcgatacctttttcttttgcataagcaatttcctctacggctttaataccgcaatctaacacaataatgagttttacacctgtttcacaggcataatccactccttttactgatactccgtagccctcattatatcggtcgggaatatagtagtcaatgttcgaatagaactgctggagaaatttgtataccaatgctacagctgttgtaccgtctacatcataatctccataaaccatgatacgttctttcctgcccatagcttgattaagccgttctacagcaatgctcatatccttcatcaggaatgggtcgtgtagctcgttaagctgggggcggaaaaatcttttagcctctgctgctgaggttatacctctttccagcaacaacttacaaagaatcgggctgatccctgtttctttggctaatgctttagctgcttctgtctgttcttggcttggaggttgataattccatttgtgattcattttatatattgttttttcttttttctgctctcggagacgggataataccattttctggttatacttacccaatcaatccgtaaagttaggaaaaaacaaataaaaaaaccgctaattccatatatattttatggaattagcggtaaagtattgtatagtagcgtattatttgatacctaattttttagcaatttctttaggcagtgcatttttattgactacgatattcatggttttgtaacggacgaatgctttagaggcataccataagccatcgtattttccggcttttccccaagaattctttaccatataatagtcgtttccttcttgatccttagctataccgtaaatcaacataccatgatcatcggttgtttcccaattgtcataagcttcctggcgttcttcttgtgtacaccatttctgaggttgtggtttggtgttcagtttcttttcttccggtttcattttcaaccaatgagccatgtctgatccacttagttcttgtactttttccgtatcgggcataacagctacgccgtcacgtgtaaagccttgttcactgacatcagatccccatgcgattggatagccgttattaatggcattatcaaaaacctgcatgaattcatcaatgggaaggttgtatgattgcccccaacgccagttgtcttgaatttcaagaacaaatggttcgtagaacggatggtgggtgtacgaggtcaatgaaatgtaatcatttggattcaatcctgttgattcgaagaatgaatggggagtgtattcttttcctttataagtgaatttttcagggcatttacctaaatagatatcatgaatagcggcaatggcctttttccataatggattatggttattatctgtctggagtttgcgtaattttcctttggctattgctgctactacagcatccgatacggctgtaagttctgtatggttacttaatgtatcaccatacatgactcccggacgcataacttcttcgggtaccagaccaaattttttcattccatagataacgtcatagaatgatcctccttgggaaaaagatacatctccgtgagtacgtacggcggcatcggctcgatccaaataagtttggtgtacgatgtacatttcagaaaagtcgtattctccttttcccatacgaagtaattctgattctagaaaagccatactggaatagcaccagcaagtaccggcacggctttggttcttgacagaagtaataggcagttcttttactgtagtgaatacaaacccttcttcctttggctcttctttttgtgcatcttgtgcaaagaggcttatactgcataaacctaatgctgctaataatgtaaatcttttcattttagaaataatagttttgtttgttatgttactcattcatgatagtttctacttcttcgatagtgatagggatgcgtttctcgccagtgaaacgggagccttccgaagtaatcagaatatcgtcttccaggcggatgcctccaaaatctttgaatttttcaatggcatcaaagttcaggaagtctgtatgcattttctcagctttccatttgtcaatcaatgctggaataaaatagcagcccggttcatcggtaatcacaaagccttcctgtaagcgacgtcccatgcgcagggaggctagcccgaactgggaagaaggacggatttcatcgtcatatcctacgtaaatttgtcccaggtcttccatgtcatgtacatccaatcccatcatatgacctaatccatggggcaggaataaagcgtgtgcaccagcggcaacagcttcttccacattgcccttcatgagccccaggtcttttaatccttgaaccagcactttgcagacttctaagtgtacagacatataggttatacctggacgagtaatttccaatgctttatcatggcaagccaatacaatattatacacatctttttgccgtccttcaaatttgcctcccacaggtacggtacgggtatggtcagaacaataatttgtcactctttcagctccggcatctgtcagcatcatgcgtcctggttctaatatatggctatggtcatgattatgtaatgtttccccatgttgggtcaggatagtggcaaatgaagtcatgcttccataagaagcggcgatgccatccagtactccggcgatatattgttcctttattccaggtttacatagacgcatagcggctgtgtgcatttcataaccgatattacatgccaaatcgatttctgctatttcgcaagcttcttttacagaacgtaaatcaactacagcttttatcaattctacagaagcgtatttctttactatagcggcacggataccggttaagtcttccaagagcatcatattatcgaatcggtagggaggaaggaaatgtacttttctaccttgtgcgatagcttttcctaccacctcttttagctgggggaagggaaaacttttctgaatacctacttgtgcagccaactctttcacactgggttggggccccatccagataatgtcgtccatatctacatcatttccgaagaaataatcctctcctgcttctatatctattacacctgcatatccggggtgagaatggccgaagaagtagaggaatgaactgtcctgacggaatttatatgtgttatccggatagtttgccggagcttcattattacctagtataaggataataccgttttgcactttgtttctaagtgcctgacggtgtctttgataagttgcggaatcaaacatggctaactttattttaattgaaaatttattgaactgtgttgcaaatgtaataattataatcttaaaagtactatttgcttatttgattttttaatcgatttcggctttatttttatcatttgtcaatcttgcttttctaatttcacaggtttctcttatttttccttgataagttgccattcagtaatttatactgctaggagaatttgattgatatttatgatggaatgcaattatttaataaatataaaagatacggctaaatactttgaaaaggttaactttgcagtgaactctttcaaggatagatttgttcctcaacattgattatgaaaatagatgataaaacagggctggtactggaaggcggaggtatgcgcggagtttttacctgcggggtattagactatatgatggataagaaggtttggtttccgtatggggtaggagtttctgccggagcgtgcaatggtctttcatatatgtctcgccagcgtggtagagctaagtttagtaatattgatttattggagaaatatcattatatcggcataaagcatttatggcgtaagcacagtattcttgatcaggaattgctttatgaacattttcctaaggaaattcttccttatgattataaaacatatgctgaaaatcctgctcgttttgaaatggtgactactaattgcattacaggtagggcgtgttatttggaagagaaacatgatcctcgacgtattattgccatagctaaggcgtccagcagtcttccttatgtttgtcctatagcttatgtagatggtgagccgatgctggatgggggaattgtggattctattcctgtgttgcgtgctattgaacaaggatttgataaaaatgtagtggtacttacccgtaatcggggatatcgcaaaaaaggaaaggatatgaaaattcctcattttatctataaaaaataccctcgtttgcgcgtggttttaagtaaacgttgtcgtatttacaacgaacagcttgatttggtagagcaattggaagacaagggcaggattgtggtaattcgtcctgaaaagccgatggaagtggaccgtattgaaacagatataaagaaactgaccgatttatatgaggaagggtatgcctgtgcaaaaaaaatgttcgaagaaaaacgaatacttcaaaaataaacttttggccaaaagaatgttttttatacatggggatattggaggaatgggggatcattcttgttatatggggtagatgaggttctaccgcagggatattcagtaaatgtctctaaaaaataagatggcatatgaagatgatagggcatgaccatttcatatgccattcttattgtcatttttccgtgctttctcacatacttctatccgacaggacatgacgttccggaagaagtctgatgacctcttctgattctgtgagtaaaatcatatcatgctgctttagctgttttgtttctgattttttctatcatcagtatggcatttgccgtatgtattccaaagaaaatccacagtatttccgtcttcctgtttctggcctttatccttgagagcgagtaatgttgcttttgagtgccgaagcttccttcaagccgtgttgccctttcttttgagagttcgcttctaagcaccttcctcaaaggctcatctttggccgcccttcccttgcgcacaaaggatgtggatatcccatattttgtacagaactttctgttggcattattggcatatatggaatcggcagccacacatcttacccttacattcataagcttctgctgcatacggatacagtccttcaagcgtataccctcattgaatgccttgaacgagaggtgttcgatgaacgatatgccgtctatctgtatattattgacctttgcaccgaactcgacggacttggtttccttgcctctgacgatgggacgtacataatgacggtcaatgctgacgatgcggtcactgactttccgcccttcaaacatttccttttcttgtacaagcacctttctgatgatggaaagacgcttgtgataatcctgggtatatcggagtaaaggaccgtactcgctatggatcccatccctttgactgaggagcttttcaagaagcttgatcatacggcgcttaagcattcttgtccttgaagctctcctctttcttttcttgcagtaggacagataggattccgccacattcctgtatttgttgcgcggacgccttatgcccagctccctgcaatgccggcatatatgcctgtagagccattcgaggctttcccaaaggagtttcatgtccgtaggaaaacgcatgtggctttcatagcatgtggcatcggtcatgcagacgtgaaggttatcaagataaggtttccagtgtgaagccaggagctcctggaaagaatcaatgtcaaggcgggatgctatctcattacggatggcactgactatcttgaagttggttatgggaagggacgggggaatcataattccacagaaaatctggtagtgtatgttcccgttcagatgttccaccagttgcctgtcggagaatccggtgtatgccttcaggaccataagggcgatctttgcggaaggactgaatctgttcctgcgtcccaggcgccggtccgacaggccggcggcttttgccatacattcaaacggaaagaccgaatgaagcttgccaagctcactctcattaaaactcttgcggtatttttccagaatatcaaattctgtaaaacccaaagtagggtgaatttctgaaatattcactatctttgccatatcttattagtttggatatttcccccgttttggccgtcaaatcttattttcgggggaatacctaaagatacaaaaaagccaactaattcgcaatactttgtgtatgaattagttggctgattttgtaatatttaatgaatgtccctaccgcatataacaagaatgaatgctctttccttttggaaagaaagataatatattaataatataaatgtgacggtacagttaatacttgctcggtataaacttgctcgacggtcggataatctatagtgaatgtcttttttaaatcctcaaaaaaagccatgaggactatgggggaagtcctggaagaaggtatatattcagagattataaatgttcttttgggttgttctggaagagttagatcaaatgagatgatatgtcttgtaccccattgctcattttctatttcattggattttctttcaaaactaccttctatagccttgtctccaaacttttcttgaaaaaccagtactttgcctcttgcaatttctgcatccgtgtagataaatttgtatcctcctcctgtctttactggtattgtagctaatgctttttctttaattgtttgtttttcagagtcttttaagtctcctgtaagaagtatatcctgtttgcttacaatgtaattatcggtgtaatagtctactattacatgaatgtcaagtgtgtttcctgattgatctcttacagtaataatcgcttcacctaatgctaatgcttttatggatatgtcgcaagaagaaatcattttggtttctataatttccggtttatcgcagcttatttcataattcccgtctcccccttgcaaaggaaaagagtatgtctgattattaggatagtttaattttatatttgctgtttctctattttttaaggagatgggagcaagttcatcattgctgcacgatgaaattactaaagagcaaaggaaaataagcactgtggctagcatactgttaagtctcatagtttgatcttgttttatgttctacataatttaaatgaaggattagatgatttactgcttggcaattagaaatttattttttttcttgagtttgtccagactgtggataaaatgtgggaatacaaaatgaaaaatccctctttcttctaaagaaaaagagggattatagttgagtttcttgtttctgatttttatttggcgaaacttaccgcacgtgtttcgcggatgactgtaatcttcacttgtcccggataagtcatttcgtcttgaatctttttcgcaatttcaccggataaactttcagtctgtttgtcgtcaatcttgtcggcacctacaatcacacgtaattcgcggccagcttggatagcataggtttttgttacccctggataagacatggctaattgttctagatcgttcaaacgcttgatataagcttctacgatttcacggcgagcgcctggacgtgcgcctgaaatggcatcacatacctgtacgatgggagccagcaggctagtcatttcagtttcgtcatggtgagcaccgatagcattacatatgtctggtttctctttatatttttcagctatcttcatgcctaacaatgcgtgcggcaattccggttcttcatcaggtactttacctatatcatgcagtaatccagcacgttttgcttttttaggattcaaacctagttcagaagccatcacagcgcaaagattggctgtttcacgagcatgttgtagaaggttctgaccgtatgaggaccgatatttcatcttaccgataatacggatcaattcagggtgcagaccatgaatacctaaatcaatagtggtacgtttaccggtttcaataatttcttcttctacctgtttgcgtactttagctaccacttcttcaatgcgtgccgggtggatacgtccatctgtaaccagttggtgtaatgctaagcgggcaatttcgcggcgtacagggtcaaacgctgaaagtacaatagcctcgggtgtgtcatctacaacgatttcgacaccggttgctgcttctaaagcccggatattacgcccttcacggccgatgatgcgtccctttatttcgtccgattcaatatggaatacggttacagagttttcgatagcagtttctgtggctactcgttggatagactggataacgatacgtttagcttctttattagctgttaatttggcgtcgtccataatgtcgttaatataggaagcagcctgtgttttcgcttcttctttcaaagattcaatcaggcgttctttggcctcctcagcagaaagaccggaaagagcttccagtttttcacgttcttgcatttgtaatttatccagttcatcctttttcttgtctatgatgacaatttgagcttctagattttctttgatagcttccgcttctgtacgtttgcgttgaacctcttcctgtttttggttcaacatcagttcgcgttgttttaatttattttcggcttgctgaatcttttggttacgtagggcgacttctttttccagatcagcttttttgttcaggaatttttcttttacttccaaaagcttgttctttttaattacttcagcttccgtctgtgcctctttgatgatgatgtcatacttagatttcaggccatatctgaaaagcatgtatgataggccaccacctacagcgaaacacacaattgctattattaccgttgttatcattgttattaatttatatataaataaaaaacgcacaatctatttgttaagaacccttctcttaacagtatagctgtgcgtgaatatcttcaattctaaacgattactctctgttactgatttgtttttctatctctttggtcagctccttcaatttttcctgataaggtgcagtattattcctgtctttcatagaaatattttcaaaagctaactccagcgcagccattgcccaatgccttgcggggctgaaatcagggtaataactacggtatttgtttagtttattgtcaatctgtttggcagcgtccctgtataactgttcatcttcacgacggatggtcatcgggtatcgttcgttgtcaatcagtagatgtatcttcatcatatcgtccataatactatcgttttattgtccaactttttttattcgtttaataaagcgatgcatttgtcgacctcacgcacaagccttgacaaccgttgttttgtatcattgatgtctttatcatgaatactgattgtcctcgccattttcaaattggtataccttacttctaattctttccggctattttccaatcgtcttacctcctcgtttttttcagtgagaagttgctttaactgtgcattttcatgtttcaattcatcatgcaaatacataaaatgcctcagtcttgcctcgaaagtatttaatagctttttgtcttcttcagtcattttataccaaaattgtacacaaatataaaggattggaagcaaacacgaaaatatttcgtcctaaatttatcgtttgtcgtttaaaaaacttttttaacgtctttattagctgtttttcccgtgctgttcgaatatgatctttttactattacatatgtctgttgaggattgtctatcgttttaatgttttataggacaagatgtgccaggtagtaccgattgcaataatcagaaacaggattcttgcccaaatgtagggtagtgtccagatggcgcaatagcttagggtaatccatattaatgatacggaaatgattttggcatgtaaaggtattgctttatgctcgcggaaattgcggatgtagcttcctaaatatttttgttggatgagccaatgataccagcgtggtgaactgcggaaatacatggcggctgtcagtaataaaaagggggtggtaggcagtaaaggaagaaatatgccgataatgcctagtatgagtgaggttgttcctacaatggtatatagtattttcataggtgcaaatatagaccaaaaaacaaaaaaatacagtgtcctttttatattattcttttttatggtgtatctttgcgtcctgtagcaccgaggtgacattaggtgtgagttctttcttattataattaaatgctatgtatacagtaattaaacgaatggaaatttcagcttcccatagcttgaagctgtcgtatagaagtaaatgtgagaatttgcacggtcacaattggattattaccgtttattgtcgttccgaggttttgaacgaggatggtatggtggtggatttcacgcatatcaaggaaacggtgatggggcgtttggatcaccggaatttgaatgaggttgtttcttttaatcctacagctgaaaatattgcacgctgggtatgtgagcaaattcccacttgtttcaaggttgaagttcgcgagtcagaaggaaataccgttatctatgagaaggattaatgaaatattttacagcttacagggggaggggtatcatactggaatacctgccgtttttgtacgtttttccgggtgcaatttgagatgtcctttttgcgatactcagcatgaagaaggtacattgatgagtgatgaggatattgtgatggaagtggcaaaatattcgacccaggtagtaatactgactggtggtgagccaggattgtggattgatgaaaagttagttgatgcattgcatcatgaagggaagtatgtttgtattgagacaaacggcacttgtctgctgcctgaaaatatagattgggttacttgttcccctaaagaaggggcgaaaataaatctagatcgtatagatgaggtgaaagtggtttatgtgggacaagatgtttctgcttatttggatttgtctgccagtcattattttttgcagccttgttcttgtgctaatacagaagaagtgattgcttacattttgcaacatccagagtggcggttgagcctacaaactcataaacttttgcaaattccttaagaaagtagaagatataaaaaaagattatccaatggcgtggcattgaataatcttttttgcacgggaggagaggctcgaactcccgacacccggttttggagaccggtgctctaccaactgagctactcccgtgtttgcggctgcaaaggtagtgtaatatttggaatatacaaacctatttatgaaaaaatattgttcattattcgtttaataggcctaactcattgaacatgacccggtatattgctgattttttttcaatgggcaacgggtaggcacggctggacgaaggcattctgtataatcgcattgtccggtcttcgaattcgaaaggttcactggttcctacaacgggttcttttacctttatttgttcacgaataatatccgttgctttttgtcctgtggttacaatggccttgcacattggaatctgcttcagtagcaaactgatatctgtctgttctacaacttccagaaatttgtctgaggcattgtcctgtaaacggcgaacagctgaagcggtatcataaagtgcgatgccttttttgttcaaaagatcaataatacgttccttgtcaaatacttttttgtcaggattcagaaagtggtctttgttttggaaaaatattattccaaaaatacgccacatatcattttgcagattgggataaaagaattccatgctccatcgtttcttttgtgggggaaaactgcctaacatcagtagtttggcgttaatcggtaaaaaaggctctaatggatgttcttctatatttaataaggatttcataaaatctttaatgattattcttttggctttggttcttttttagccagtaatacaatgttatacacatattccgtcatccagttttcagaatatcctaaggcttgtttgtatttacgaatggcaacacaggtcttgtgtacgctttcgtctttccagtcggtcttggtcatgatatcatgaattgttttctcggtcatgttacgtaacatttttttcattacgctgggcatacggaatttccattgcatcaaattacctatcagcatcatcaagtcattgctgaatccttggaacataaaaagataagtcttgacatcatttacattcttgcaattcttttttatagaaccgtcaatttctttaaagaaatcatcacttagaccataaagttctactaacatctttttgcagcgtgatttctcagcaattcccaacttgttgttttgggtcggtattttaagggtgcgtttgaaaactgccatgtctggcaaaaaattaatatttgtgatacctatgttgcaggccattacagactgataatatacacggattagtgtcatgaagtcttccataccacctatgcggcttgtttcttctccttctgtctgttttttaccaaataattttgaaaatatgctcattgtgttcttaaattatattgttttcctgtctgcaaagatagcgataaaaactgaaacatttttgattaaaatccttttgttttactatttatcatttttattgaatggttgatgccgggggtattgctttgtgttaccagcattccaaatcattttcaatatctttcattctgtctttggtgaaaactggatttttgaccccgttacgtttctgaattcgatagtcttccaatagacggaatgcatatttccctagtaaagtaatggctatcaagttacagatagtcataaatcccattgccatatcggccaggctccatgccagttccagactggccaatgccccaaacataaccattcctcccactgctatacgataaatggggatagcccatttccgatgagttatgtaacgtacattggcttcaccgtaataataatttcccaaaatgctgctataggcgaaaaacagaattgccaccgccacataaatagtcccgatgttgcctatttcattattcagtgccatttgagtaagttttattccattggcttcttttgtggaggccactccgctgaaaagaatgatgaaagcagtgcaggtacatatgacaagtgtatcggtaaaaactcccaatgtctgaattaatccttgttttacaggatgggtaacatcggcacttgccgctacattgggtgcggaacccataccggcctcattgctgaataatccacgtttgattccttgcattaatgccatgcctatacctccgcttaatgcctgttcccagccaaaggcattcgctataatcaattcaataacttctggcaaatgctttgcatttacaattacgatgaaaagggataaaaagatgtatcccaatgccatgacaggaacaataatgctacttactttagcaatacgctgaatgcctccgaagatgataattaatgtgagcgaggtcagtatcactcccattaggctgggaggaatattgaatgcttcttcgaaagcggcacaaatggtattgctttgtactgaattaaaagcaaatccaaaagtaaagataagcaaaaaggcaaacaaaactcccatccacggctgttttaatccttttttcatgtaataagctggcccgccaacgaaagaattatgtccgtgtactttatataattgggccaatgtggactcaataaaagcgctgctggcccccaaaagagcaattacccacatccagaaaactgcacccggaccacccaaagtaatggcggtggcgactcctgccaaattgcctgttcctacgcggctagctatggaaacggcaaaagcttgaaaagaggaaatatggtgttcgcgaccttctgtcttgcctgtagaatcacctaatagacgtatcatttctcttatcatgcggaattgtacgaaatttgttttaaaagtaaaccaaaatgcacatcctaacagcatgatgatcaaaatataagtccaaagcacatcattcactctgctgattaatagggtcagtatatccattttacttattccttgtttaatttaaaatagaacttatgtccatggaaaacaagttccactagaccaaaacggataaagtctgctaatagttcacaagttgtcttgtggtttaacctgcaaagtttgcaacattgatttaatgaaagtttttctttttctttcaagacatccagtaaccgttgctctctttcggtaaatgttacaagtgctccttcaggtttcttgctgtgttgccacatctttagatggacgggagtggccagtatgttttcgtctttgatgcggatataggcccatggcttattcgtttcatctagggcatatacaggtttagaaaccgtttcgttaatacgtatttccaatacagtctttccttctaccttgtaagtctgcgtttccagttctactttgggcttgcaatacatggttgctgctgcttctatcatatatatttcttcgtcagagcggactcctgctattttgccattgtcctttactcctattaacagcctgccgccctcggtattggcgaatgcggaaaggctacgggctattttgcgtgcgtccgaaatctcgaatttgaaatcctgatgacagtgttctccctccgagacaagctgtcgtatgtattgtgtatccgttaatgctttcatttcaattgcaaaaataggaaaaatgaaacatattgtgggtatcgaatgataaaaaagccgatattagtttgtctgttatcaagctttttgcttcatttgcagtggaataaaaataattagcctttaaaatctatgggaataagaaaaaaatgtttgatcattacattattatgcttttctagtctgatgcatgcaagtgaattcatgtttaaacatttggaggtgaaagatggtctgtcaaacaatcaagtccttgatatatttaaagattccgaaggttttatgtggtttgccacagcttccggtttaaatcggtatgacgggtgccagatgactttgtttcgtagtaataatgctgatccggcttctttacctgataattatatcaaaagcatacaagaagattataaaggaaatttatggattcttaccggtgtgggttatgtcatttacaactcggaatcagaaacatttgatagggaggtgcatgcatggctatgtgaagtcggtattgacggaactccagcattagtatatatagaccataataaaaatatgtggttttatataaaaggaaaaggctgttatttgtacattccggaatctcaattactgtatccgcttttgtttaatactcatcagttgccagaaggtgatattacggacattgtagaatgtagcaagggaatcttgttggtatataataccggaagacttgtttgtttggatactcggacaaatgagattaaatggcagcaggatgatttggttggggaattgggaactgacaagcagggaattttcactctgtttgtagatcgtgataatgatatatggatgtacagtccgcttggaatatgggtttataatccggaacaggaaaagtggctgtcttggctgacaaatattatcaagcgtcggtctcataacatggtccgtgctgtatcacaggataagcaggggcgtatatggataggaacagatcaggatggcattgatatattggataagaagacaggggaagtgaggcagttgcggaacaaggcaggtgatgaacgtagtttgcaaaataatacagtaatggttctatacgaggattccagtgaaactatgtgggtggggacttataaaaaaggaatttcttattttaatgagtgtgcttttaaatttggtgcagagtatataggagatattagttgcattgaagaagacaaagaggggtatgtgtggctgggtaccaacgatgtcggtatcatatattggaattccgtgactggcaaccgggctgcttttccacagaaaggtatggataaactcactactgatgccattgtttgcattttgaaagccagtgatgggaaactttggattggtacttttgggggaggcttgatttgttatgataacggtcgtattattcattataaaaaaaacatatcggaacggcaaaattctttggctcataataatgtattggctttggctgaagataagcaggggattatatggataggtacattgggtgggggagtgcagagtttgaatcccaagacgggtttgttcaccacttataatacaacttcggccggcttgatatccgattatgtttcctctttgtgtatgggaaaagagggctctttgtggattggtaccgctcagggactttcggaattggatattgaaactaaaaaagtggttaatctggaaggtactaaatctggtaaggaatatttttcagatcagaatataagtcaggtgtatgaggatagccgtggattgatatggattggtacatgtgaggggctgaatgtttataatcccaaaacggatgaactgattatattaggagtggagcaaggagtttccagccctatcatttctggaatagtagaagatggtaatgaaaatatatgggtgactacagcacgtggaataactaatgtcataccggcagtagatttaaaaacagggcgctatatttttcatagttgtgtttatgatgacaaagatggtttgcaaaatagtgggttcaacctgcgttccattaaaaaattgtcttctggagaaattcttatgggagggctgtatggtattaaccgcttccgtccggatgatataaaatacaataaaaaacgtcccagcgtgatgtttacccgtttgttcttgttcaatgaagaagtaggggtgggtgaggaatatgaaggcagggtgattttggataaggtgttgaacaaggtagatcagataaaattgagttatgaacagaatatgttcagtgtacaatttgcttctgataactatattttgccggaaaaaacggagtatgcttataaactggaaggtttcaatgagggttggatgactactgcctttggcaaagtgacttatactaatctagctcccggaacttatatgctgaaggtgaaagcaatcaacagtgacggatatggtggagatgaagaagcttcattgaaaattgttatctatcctcctttttggcgttccgtttgggcatatgttgtttatagccttttgttggttgctgtattgatattgggacgctattggattctgcgtggagaacgggataaatttaaaaaacagcaaataaagcaagaaatagagaggaatcaggagaaggcagatatgaaattgaagttcttcactcatgtcggtcacgaattacgtactccgctcactcttattatctcaccgttggaaacgctgatgaaggaatatcaatcggatgctgctctgatggataaattaaatatagtgcaacgcaatgcattaaggttgttgaatcttgtaaatcagttgttggattttaggaaaattgatgtgaatggatattatttaagtctgtctgatgatgatatcatctcttgtattcatacgatttgtgattcttttatctctttgtctgaaaagaaagatatttctctcatttttcattcagcagttccttcgttgaatatgttgtttgatggggataaaatgagggaagtgatgatgaatctgctttccaatgctttaaaatttacttgcaatggtggacgagttgatgtgtctgtcggtttagtagaaggacaggattctcgggaaatgctggaaatcagagtggctgatacaggtgtcggcattaaagaagaaaacagagaacgcattttcgaacgtttttatcaagtggataatccggatatgaatatctcagatggcggaggtggtctgagtattgtacgtgattttgtcacacttcacgatggcacggtgaacgtaatggataatactcctgtcggttgtgtttttgttattcatatcccggtaaagcgttccgagagtaaaccgacgaagatagaacaggtgcaagttacagataagccggtagaagacatttccacacttcagattccggagttttatatggcgtctaatgccggggaggaatcggaagaagaaccaaaccatataataacaatagaaggactggaggaggatatccgaagattagaatctggtaatacggaagaaattgcagaagaaaaaaacatagaaacaatctcagccgttgctccacaaagagcaacggtgattcaattgattgagggtgaggataatgagatgataactcatattattccaccggaggagttgccggaaatggtgactgctgttcctgaagaaaaaagtgaacagaagttgaaaacggtttggaatcatgcttatattgatttcaaacctagtgggactgccataacttcgatggatgaaaaactgataaatcatgctgtgaaatatgtagaagacaatattgcacgcagtgatttgtctgtagaagagttaagcaaggaattagggatgagtcgcgttcatttatataaaaagttattggctattaccggtaagactcctatcgagtttattcgtatgattcgtttacagcgggctgcccaattactccgtggaagtcaacagaatatttcagaaatagcctatcaggtgggctttaataatccgaaatatttcagtcggtattttaaggaagaatttggtatactaccttcggcttttcaatatagacaaggcagatagttctcaatattttatagtgtcatttaaagtgtgtatcggagtttcgtcaacagacatacgttctgtaacagatttcatctatgagtaaaaacaattccattttattattgtttttattagtaatagtcatacattaaaaccaatatagaatggaacatacagttatacatgacgagaaagtagaccgtttcgaagtatttgaatcgggacaaatcgcctatttgcaatatgatgaaaagaacagagttttggatatccttcataccatagttcccccacagttggaagggcagggaatagctcaggctttgaccgaggccgctgtgagatatgcttcggttgtagggcttaaaatacgtcctacttgttcttttgcaaaaatgttttttacccggcatacccaatataaagacatgttggtggagtgagaaataaaatcagacacggattgtataaaatgccgtgtctgattcgtttttaactctcttatctttatatatatttaatcacattgtttgtgggtcataatatccaatactagtttatcggtttcattcatgccttgtgaaccaattctggtcaggttgcggatactgcggtccacatcattgtcaatgataccttctacagaagatacacatttatgttccatcgctaatatagctgaaaatacagcagtagaaacaccgctgcttaatttcagagcacaactgggcttggctccgtcacaaatcatacctgtcaggttagcgatcatattctgtacggcaaaagtgatttgctcgtaagtgcctcccatcaaataagtgataccacagctggaacctgttgcagccactacacagccgcatagtgcagacagacgtcccaagctttgtttgatgtaaatcgctgtcaggtggctaagtgtcagtgcgcggatcaattcttcttctgatttatggttgtcttcggcatagactactaccggtaaagtagctgtaattccttggttcccacttcctgaattgctcatgacaggaatcatagctcccgccatacgtgcatcgcaagctgccgaggtataagaaaggatgtgggtaaatgtattacttcccaatatttgttcttcgcttttgctgcttttcagaatcttgcctaattcgtgaccgtagtttcctttgaaagaacgttctgccgctgctttgttcaaacgtttggtctcaagaataaaacgaatttcatccaatggtgtggtggtggcaaaatcgtacactttccgcaagttcaactccggtttttttgcatcctcattgcaggtggaggtagtttgtttgtttagtaaaacttggttgtttagggccacatatataaaattggtatgcccgcaagcaataatggccgtcgctgtatcaccatcagcttcacagataatttcgatatataacttttcttctatattctctttcagcccgatagagatagcttgtgagtcaattagttttttaccctctgctacggcgtcaggagtgctgtcttttaagacttccaattgatattcggattttccgattaatgcccctaaggcgatagcgataggtagcccaatcattcctgttcccgggatgcctactcccatggcgttcttaagaatattggcgctgagtaaagctttaatcctttcaggtcttttacctagtgtttctgttgcttttgctacacaaagggctacggctatgggttctgtgcacccgatagccggaacgacctcgcgatttataagggcaatgatttgctctctttctggtttggcgatcatagtagataattattaagggatcttgcaaaaatctttttgaaagtgtgtcaaaactcgaataaaactatcgtttcgtttgtcttttcctttttgttgattttcagaatatgctttaatgaagaaatattctgaaagaataaaatgataggtttatttagttttgacactccttcgacttttgacacactttggttattttttatagttttgtaatccggtctggaggaaatcaacatatttgtctatatcctcatcatatgaatatgatttattcaatggttttccctcattgtcaatcaatacatagaaaggttgtgcattggcaccgaatttagagcgttgcaggtaactccatttatcaccgatcgtgcgtagtgtacgttccttaccgttctccatcactttgatgtgttcgggcaatggagttttgttatcaacgaacaatgtaatcagtacatagtcctcagtcatcaacttgtttactttcggatcagtccatacagcagcttccattttacggcaatttacacatccgtaacctgtaaagtcaagcattaccggttttccggtacgttttgcatattccataccggcatcgtagtcatcaaactgcgcatgtacttcattggtgtataagttgaagtcttgtgtattcatgggaggagcaaatgcgctgacagctttcaaaggagcaccccataagcccggtaccatatatacagcaaatgcaagtgagataagagccataaaaaaacgggcaacacctactttatcatcatcatcatcgtgagggaatttgatcttacccagcaaatagaagcctagcaaagcgaaaatcacaatccacaaagcaaggaatgtttcacggtctagaattccccatccataagccaagtcagcaaccgacaggaatttcaaagcaaatgcgagctcaaggaaacctaatactactttaattacattcatccaaccaccggatttaggcatggatttcagccaagacgggaacatggcaaacagtgtgaatggcaacgctaatgcaagagcaaaacctaacatgccgatagcaggggcaactacactacctgtagtggaaacttctaccaacaaaaagccgatgataggacctgtgcatgagaatgaaaccaaagatagggtgaatgccatcaggaagatacttaacaaaccactggtctgttccgctttactgtctactgcattgctccattttgaaggaagagtaagttcgaatgctccaaagaaagaggctgcaaacacaattagcatcaagcagaagaatatgttaaaaatagcatttgtggaaagtgcattcaaggcactggcaccgaatatcaaggttatggcaagacctaataatacatagatcactacgatagaagcaccatatgtccatgcatcacggattcctttctttttgtctttgctacgttttaaaaagaaacttaccgtcattgggatgataggccatacacagggcgtaaataaggcaagtaatccaccgataaacccggcaaagaagatgtaaatccatgaacggtcttgttgtgatgtcgtttcgccaaatgcgttcagctcttggataaccggagtccaataatcttggacagcagtgtcattgccgatcagggcggcagttgtagcactatctgttgcggtagttgcagtagctgtttccgctacaggaacttccgttatggctgtttctgtttttgcgggttcagtagtcttgcttgtagtggcagcggcaactccttttccggagaaagagaaagaaacttcagtaggaggcagacagttttcatcgttgcaggcaccgaattccatataaccttctatcatataggtagcgcccgttatttttagtttctgaatgaaaatggcagtgttctcaaagtaacgtaatttcatttcaaacaccttgtcgaagttttcaatttctttaccttgtggagtgagctttcctactaattctactccttctatcttgtctacgttgaaagtagcggagataggacctcccgaaggaagatcagtggaataaacgtgccatccggcatcaatcttaccagtgaatactatttgtgcttccgtatcggaaatcgtctttaactcggttttgaattgtaccggatcttgaatctgggcaactgccggaagcaatgccataacgattaagaggcaacttaaaaaaaacttctttttcattacgtattatttaaatttggattaatgttcataccgcaaagtaagggataatatcttagatatgcctctttatacctatattaatatcggcaattgctgttttcagaataaaaaaaagagcaaaaagataacctattgctctttttgaagttccataactttgttcctatattgggagggagtcattcccactgaggattggaaaaggttataaaaggtggaaatggagttaaatcccagctctgtagaaatggctttcagcggagtttcgttattggggtcggataatagacggatagcttcttcaatacggaaacggtttacataatgagtgaaggatagtttggattgttcattgatgatacgtgatagataagtacggttagttcctaatatttctgctactttgtcttttgttataaaattgtctttgtaaattttttcttctctcataatacgctctaatgtacggaaaagttctaaacttttctcgtcggtgagtgaggaggaagcatatttttcggaagtagaaaccatggagggggcattggtttccaattcttttatacggcgattcagttccgtttctcttttgattgcttcttgattttgcttgactatacttaaataaagtttgtttttacggtggtagaggtaataaagcaatcctagaacaatcacaatgataataagaataaatgtctgttgttgtatacgctgttctttctgcattacatccagtttgctttgttttatcaaattttcctgccgctcagagtcgtatttgaatcgcatttcacttaaatctctttctttgtccttgttgaaaagactgtcgttttccaaacggaatattttataatatttcagtgcgtcatgatattggtgcaattgctcatagcaggtggacagattttcgtatagttcattgcgatggatggcgttgacgcgtgcataagaaatagctattccttgttttaacaataaaatagcttctagttgtttgttttgctgcattagtatacgtgcatatcccaaatgggcatagacaatagaggaagtttgtgccgcctgtttgtccttcatggcttttttgtaatattccaaggcctgggcatattcacccatatcatataatatattgccaaagagattgtaggtatgggcttggtcgtagaaatcattttccagcatcaatgtttcggcttcatgtatatatttcattgcttcctcattctgtttcattaaaaaatacatataggcagaatttactgcaccggaataaatgatgtatggattacgcatactgtgtcctaattcataacattctaatgcgtatttgataccggctgtatcttttttgaggtaatagatgtttgctaaattgcctaaaagcaaagcgtattgttgttggaaattattttgttgtgccaattggatacctttataaagccatcgtatggcacggtaataatcggtttcaatatttgcagagtagagtccgagactaccatagacggaacaaagggtggagtcattattcagtttggttgctagttcaagagaaaggttcaagttttttttggctattttttcccgtccgctcatcatttgtgcttgtgcttggtagatatatgaatagagttggagtagaggatttttagtcttgtccgctacgtttttcataatctcggcgtaagtgatggttttggaataatctcctttatttaaatagtattggcatagaaactttaatgcatccccgttatcaggttctttcctaatgatctccaactgtttctcaaggatgacggggcgcttttgtgcatgtacacaaaaggatattcccaaaagtaacagtaagaaaagacattttagtttcatatgctttttttcggttgagagtgcaaatataataaaacctttaatttttcttgttcaaaagtcttgcatatttaaaataaagtcgtacctttgcaacgctttcaacaaaaagcacttctgaaaggaagttttggagaggtggcagagtggtcgattgcggcggtcttgaaaaccgttgtaccgcgaggtacccggggttcgaatccctgtctctccgctggaaagaattgcaaaacaaagaaaatccctgtaaattaatactttacggggatttttttgtttttggtgcatggcaaaaataagcatatcaaagcattctttcggtgtactattcggtgtacctggtcttatgcttacatatgtgatatcctcatgctctcaaaaaagatcaagaacttttcaaaaaagacgacgacgtttttaaaaaagaacaggaacttttttaaaaacgtcttggtcttttttattgttaccaatgcatcgtaaaccgtcattctgtggaggtacagacctttcatgcgtactttttgcggggaaaaagcctaaaacaccctactttatatcaagtcgaaacgatctataagaaaatggtatgtggctgaaaacaagtaatttatgtggaaatatacttcaaaacattgtgagagtatgagagcatgaatgagagcgatttttttatccttactacataaaccgttaataataaacatgttatatatgcagtgagggcatgagggtatacatggctcgaacttttctttggaatatgcaaaacggctatattccacgatataggaatatatgccgttttgatagaggggaaattttttatggtatataattccaataatccatatttgtaatggtttgaactataattttacgatctccttctcgtatttcgttgggagcattctgagatgcatacgatatttttgcgcccactccttttgcttttaacattttattgggaactcctttctttataagtgcattgactacagcgtctgcacgtttttgagatagatccatattgtattgtgatgatccttttgcatcagtacatcctgtgatgagatattttttgcttgtgtctgtcagcataatttgagctatttcatcaatgatagtagctgctttaggagttatttctgttttatcaaactcaaaatagatattgttgaataaatcacataaaacattggtctggcttggagtttctacaatttgtttcatgattataggtttttctataactttttctatgattttttccacatattgaatttccggtttgacttttagggatttaccaccaatgcgccacatcaatcgaatgcttccttgccatgaattggctatatgtttgtatggcatgatgaggtagtctccttggagtcctatgccaatgttgtcattaagccacatattcacgcctattcccaatgaaatagggataagattttgtttatctttcccttctttagtataatcatttgatagattccatcccatctcctcactgttgaattcttccatccccttatagttgatcttaaaattcttgtacatatagttggctcccatccgtaggaaaggatcaatataatttgaatggagatattcacctagacgccactgtaaaccgattcctgccatacctagccatcttgattctttaccgttacggacaggatcggaactgtagtctaatgttccttgtaaatctagataaaaatgagagttaagttcacgagcaaaatatagatttcctccaaaaataaaatcttttttattagtacctacagtgtaaccgcctttattattagtatggaaattaatgacattaaaacgtgtcatttgaagtccggttgcgcctatacctatttcccatgcttttttattattatcggctgctccattctttgcattttgttgtgcatttataggtaaaccgaaacataatactgaggtaaagcatagtatgagatggattttatgtatatatattttcttcatatttttattcttcatagataacttgtacttcgggcaactcataagagctgctatagttttcaataataaatgttttttcatcctttccttttcggagataaccttgataatatctatagaaatatgaactgttgccactgtcaatgtatatggatgaatttaaaaatggtgcgaatactttgaacgttggaacttctgcagaagatctgttattagaacttgatgcttcttgtgagccggctgttgaggtatatctgaatgtgatatatgccattttaagtttgctggcttcttcttcagtatatgctatcggttctacatagtccattccattttctttaacgacacgtgtggtcgatgatttgtaaattcttgtaaagtctatttttgaaaaatccaattcaccttcagcagatgagaaactgggtgcttctccattggatattatttttaattttaatgtttttagcgtaggtcccatttgataaggagctaataaacaaacaccattccattggaaagtttctccataataaggttctctagcttttacagtgtaataaacgtcacttccatcccaatattcagattgattgtttttgaattttccgggattttcttgaatgaaccgataggtataaatatagtaataatatcctccattatttgaactagagccttggcttgaatatagttttttatctgacaaaatactgttgggattatttttgtcagagactctatatgcgtctaaattccttgaaccactattaggtaaataagaagggatattttgccattggtcttccggattaacttttcgttgtatatagaaatatagatactgataatcgtataatgaatttgaattatcgcggaggatcattctcatgcgtactctattaggaacatatgtgtttttagcggattcttgcggcaactttccggctagggttacttcttttaccgttccccagcgtaagtttatgtcttgtatttcgggtaaatcttctttaggtacaataaactctccgttttcattggtaatgtaagttttttccgcattgatacccggcatgccttttacttgagcttttggtgcgatttgtccagtttcatcatatactttatagagtacacctccatcagttgtgcgtacatattcaccatattctgattgagaatattgtgcaataacattaggtatacccttaatgatggtaacttctgttcccggttttcctggttctccgggtttgccgtctttgccatcttctccgtctttgccatctttcccgtgtagatagtcataaaaatcctttaacgtatttttttcacagtcccatactccaccatttttgtggtcaataagtgcatctgttgtaccgcaaaatttagctaagtcatttttccacagttcatgtgctgataaaccattgcttccgtttattccgtctttaccagctaaataattgaaaaaatcatattctgaaactttgtcagaaggccatttttgtcctggatttttaggatcattcatattgcctgttcctacagtttctttccatagttcataagcggattttccattgttaccatttgttccactgaggtaagtgtaaaaatctgccattgtaattttatctttggaccatgctgaattatttttgtctttgattttatcatttttgacgtcatttacccataattcgtatgcagatgctccgttaactcctttttctccttgagcttttattcttgtatcagtagtacctatccaccaatttccgttattacctatatggggagatacgccatcatctcctttctctccttgagcttttattcctgtatcggtggtgcctatccaccagttcccattttttatcaccggggtaagtccgtccgctcctttatcaccttgttctcctttgggaccttgcactgcaatccctgtattggatgtgcctatccaccagtatccgtctttaatgaaaggggttaatccatcgcttcctttttctccttgagcttttatttttgtatcggatgtattgatccaccagtttccattaggaccaatataaggggatgttccgtctttaccattttctcctttttgaccttgagccggaaaatttgtatcacgattgccaatataccaattaccattttcaccaacatgtggagtaataccattttcaccatctttcccttttaaatataaaaagaaatgttccattgttgtttggtctttgggccaatttatattgccgccagcaacagattgtttccataattcataggcggaaaatccgtctttgccattaattccatcctttccatctttgccgatagctttgatttttgtatctttattgccgatataccaattcccattttcgccaatatgaggtgattctccgtctcttccgctaagaaaatcccaaaaatcggcttctgtattttttgaacctcaaatccgcaactacgcgcctaatatgatacagaagcgaaaagaatctgcatcgttagtaaaaagggggcacagtgcatcgaatgtcaccataaagacatataaatgccccttaccccaccatgcgacttgaggcaatacgcaaaatcacgactataagttgtcggtgttatccaaagtcattctggaacacattggcataagcattgttgcatgaatagatattcagcacatacttccttgatgtcctgacccatttggctggcacagagatgaacttaaagacaaacgtcttgatgcggcttgttgctttgagtccgaacctcttcacgtcaagcctcgccatgatgaatttatagaagttgcgtatgagtgccataagcagaagaaacaccgtgttttctcccataaaggattttggaagcctgttccagccgaatccgttattcatatcatcgaagatgcgttccttccctccacggaggttatagaattcgacaatctctttctcggaagactcgtagtcatttgtaaggatgcagcggtaggtgtattctccttcccacaggtcgagttcgccgtctatccgcttctgtctttgaatcacaagacggtatgccttccctttccatttctcgatgagaatggaggccagctcaaactcaatgccgcccaattccactttcttccaacctctgagggcaaagatgtcattgtagagcgaactgcatcggttagcacggatatagaaggtcttgcagtgtttagcaatctcttccactatctcttcagaacacgagccgcaatcagctctgaaacggttgataataagcttgttttgttcaaacctttcaaagaacctcttcagcgtgtccttctggtggaaacggacatttgtgttgccgtcgctgttctcaatgccgacaatcaagttgccaataaccgccacgccagggcgataaccaaggaacttcttgtatgtaggcttcgcatcaaacttctcagcctctatgaactggtggtcgaagtcaacgtcatacccctcgccctctttcagctgccctgtggacaataggcaattgaggagcagtgtattcagcttgtctgccgtgttgaagtcgtaggtcttgccagtgtcggatgtgtaggaaatgttatcctgggtcagttcctttatggctctaagaatcgtgtcggcactgcatgtgcgaagtgtcggatgaagcgaaaggtggtacatcagatgagtggtgacatcctcgatgcatgagccgccacaaaaataaacgctcataagcgaacggatgatttcgctgtattgataaccatacagcctgcatctcataccgagggttgagtcgattacagatgagagtctggagtcaaattgctccattattgaaaatattcctccaaaaggagtgagtttctcggatttaattgctacctttgccatgtctgtcgggtttgatacatattttgatttgcaacactaagataggtgaaaaatctgacatggcaaattcctgagcaactttttgttgctcaggtacttaaaaagttatatttgtaatagtgttgcggaattaaggttgaagaaggccaaatgagcgaagggtcatgagggttggtgacattaccttgggtgatcaggattttccattgatcgtatgcagacattccatcttttcctttgtctcctttttctcctttaatataaactaaaaagtctgctaaatcaacttgggtggaaggccagtttatatgaccggtttcaacttcttctttccatatctcataagcggatttgccattggttccctgaggaccttggggtaattcaaaatcaatactgctgcacgagaaaaaaaatgtgcaaagtagcactgataatacataaattttgcatttcttctttgtatacatgactgtaaattattaaaaatgaattgttctttgttgttacatattggataaactccgttctgctttattgaatattgtatcgttggggggcatgcaattttatattttaggttattctgctgtgtgcgatttacattataataatattcacattttatttggatgcaaagttctatatttggtactaaaaagaagttgcgtatttaaaagatttgtttgcatataatcagttctttcttttatatctgcataaaaaggtttcctatttttctaaatgttcgttttgggatagttttaaatggtagatgctttatatgattttacagaggggtatatgtgataagttttccatatattgatggtggattatgattaggttttgtgatatttgttattatagatgtatagaaactcttaaaatagatccatataccgagatcaggaaacaaacttattattagctttagtgtgtatgatggagataactatattcataatctttaggatgcgggatgtttgtttaatcgtttgcagaaactgaatatgtttcaagagaaggtgtatctcttgattcttctccttttttacgtatttcgttaggagtagctccgatatttcttttacagtaggttgtaaaatgggagaaagtcttgaaatgatagtccagcattatttgtttgatgggtaaagtacttttttttaatttgaattcaatttcataagatgtttgtttttgtaaccattgatatggtgtatctccatggaagttttttttgaataactgtgtgaaaacagtatcattatatccacataaaacagctagttctttggctgttctgcaagctttgtaatgtgtcatgacggatacgaagaattgaaggtcgttagatagcgcatcacggaaaatggaggcaatttcattcttcttatagcaaattttaaataatgagaacaattcatattctttggctcgatgtaagtcgggaatttctgttccatttttcatgtaatcgaccagcaaatctaagtaggaacgcattaacggataaatgggaaggacttctaccggttttacttcttcgatggatatatcttgcagatactctattgttctgctatgtagataaggagccacaatattacatgcatgaatgacaagttgtacttcatccattgccttgattttacattgatgcaggctgctgatgaagaaaaattcattctgcattgccatcagaggcatggattctatatgatctctgaataggcataatgatccttttagaacaaaacaaacttgaaattcatgggtttcgttcaagttttggataatctctcctttacttatatgaagacacctgaattggctgaatctggatagcgcaagaggatcacggtataaattctttagtaaaaatagcatttccatacattataaacattttaagataaaaaaagttttgatacatctatcccggacaaatataacttgatatttaaaatgttttaaagctataggaggaatatgcaactaaatcattgctaatatgaaattgaatcttctgtttaagaaagagtttatcaacatatgaaattataaggtatttaaggccggatgctttggatggtagcttataaagtggaagatgtttgctgattttttttatgagtgaatgtaaataagtgatttggaatggagataaatctaaggatctttttcttattgcaatgaacaataaggaaattacaaataaaaatccgaatataaggccgctcatgtgatactgattactaagtatcgattatataagtattccccatcttcgggagtatggttcaaagtacaaagcaaccattggcataatggattatttgtgtcgtgggaacaatagaagtaaataaggaatgacggactacctataagtagggtaagtactgtcagaatctctattgttctatgatgaagtgtcttgttcacaggcatttcatgatgtgtcaatttaatcatgcttgctttttttacaaaattggttatagaaatacatactgataatacctattaatggtgataattttcggctttatacctaaaaataagtactcgtgtattttatgatgtatatgattatcagtaataaaaccccaatttttaggtattgtgtactcttggtggcaagggtaactttgcaacaaatttgaaaacataaaataataactattaatcaataaaactaaagtattatgaaattgaaaaactttttagcgatgatggctattgcattgtgtgcagtagcatgtagtgacaatgatgataaaaaggaagataccgtgattccggctcaggaggttgctggtatttacaatggaacattatcactctcagtatcaggaaatgatcaaggaacgtcagacagtcaggtgaaaattactgcggaagaagggggaactgttcaagttcttctagttggcggtgctggtgaaggaatgatgtcattgccggatattgctatacctggaattaaagtgcatacctccgataatgtcacttatattttgccggaaagtgctgttgatgtaactgttggttctgtaaaatatacaggaagtttacaaggaacgattaaggatgaaaaggctgatctgatctttacactaaagccgggagccatgcctatggctattactgcgacttttgtaggcactaaatagcatgaaaagatatctctctattataaccatactgggaatgatgcttttgccattctcggcatgtgatggtattttggaaggaatatatgatagtcctgctgcttcggatagtaatgaattgggttttataagaacagacccttctacccattcgggtactatttatattgatgctactgattatagacgttggacttttatcgatttccatacacaaaaagtagattctgtaaatgtgacggattctgaacagaaagaaccggaggaatgggatattgctgttcatcgttatgatgttaaaaccaatgctggagcagtattggaaaccggtttcacaggtttttctgctttacggaatgcggatgcgatgcccgaaggagcctatgtggaggatgtttggactaccgctaagatagccattgatatgtcaggtatgatggatggtaatattgtttatatggaatcctattataatgaagaactatccaaatggttgaatgttgataaaagtaatatgccacctacctatactctttcaaacaaggtttatatggtaaagctgaaagatggaacttatgcggctgttcgtctcacaaattatatgaatgctagtggtgtaaaaggcttcatgactattgattatatttatccgtttgaattgtaaaccgacatacgatatgcatagactactcagaaacgtgtgcttgatactgtgttggctgatggcggtatcagtatcagcacaacgaattatttcgggaactgtatttgatgaaaataaagaacctctgacgggagcaacagtttccgtaaaagaaaaagtaactttgggaaccactacggatacacagggaaaatacatgttgaaattacccgataatagagaatatactctacaggtttcatacatggggtatatctcgcagactcataaagtgtctgtcagtaaaacaggtaaagttgattttatactgaaagaagatgctgtaaatatggaaactgtagttgtaacgggaacccgtactccgaaactcctgaaagatgttcccattgtaactcgtgtcattactgccgatgaaataaaaaaagtagatgctacccatattggagatttacttcaggcagaactgccgggaattgaattctcttattccatggaccagcaagtttctctcaatatgcaaggatttggtggaaatgctgtactttttctggttgatggtgagcgtctggcaggtgagactttggataatatagactacaaccgattgaatatgagcaatgtggagcgtattgaaattgtaaaaggtgcggcttcttcactctatggttcgaatgcggtaggaggagtggtaaacatcataagtaaagtgcctgcggagccttggactgtgaatctcaatggacgttacggggcttataatgagcagcgttatggaggaacaataggtttcaatgttggaaaattcaatagtgtgactaatgtacagcatacccaagtagatgaaaaagatttggcagatggaaaaacaaatgaggaaacggaggattgggcatttaaaaaggtgtatggtgataaaacttggaatttcaaagaacgtttggtctatactgctaatgaccatctgaaactgacggcacgtgccggatatttttttcgtgaacgtgagaagtcacagactagtaaagaccgttatcgagacttcagtggtggggtgaaaggaaattatgtattggataaagataaggatctggaaatagcttattctttcgaccagtatgataagagcgactacttgccgcaagatgctaatgatgtacgtgattatagtaatgtacaacattcggttcatactttttataatcatacttttgtcggtaagcatattctcaccgtgggtggtgattatatgcgtgattatttaatgtcctatcagtttgccaataatggaagtaaacatcagtatacagtggacggctttgcacagtttgactggaacccgacgaaatatttcaatgtcatcacaggattacgttttgattattattcagattccgatattaatcatttctctcccaaattaggactgatgtataaaataggaaactgttcattgagaggttcctatgctggtggtttccgagctcctactttgaaagaaatgtatatgaattttgatatggcaagtatttttatgatttatggtaatcctgacttgaagcctgaaaccagccataatttttctctttcggcagaatatatgaaaggtcgttataatttgacggtgacaggtttctataatgtagttgataatcgtatcactacggcgtggagtgaggcgttgaaagggcaggtatataccaatatatcaaatatcaggatatccggtgccgaggcaaatgcttccgtcaaatatccttgtggactgtcggcacgtttatcttacgcctatacacacgagaatataaagaaagggcaacctgtcatttcaagtactcgcccgcatacggctactgtccgtcttgagtatgacaagcattggaagaactatgcgtttaatgttgctttgaacggacgctttctgtccaaggtgaatacggaggaatatacttcgaacacttcttatgaagaaactgagaaggtgacctatccggcgtatacaatgtggaagcttacgttgtctcagaaagtatggaaaggtgttgatatgactttggcggtagacaacctgtttaattatgtccctttccgttattataataattcgcctgctactaaaggaacaactttttcagccggtttgtcattggatatagaacaattgttcaaatgaaatttggctgctaatactaaataaactatgtgatttaaataaagatatgaagaagaaacaattattgattggcggagggatagcagtcatcttgctgcttttgtttggtgtatggaatctttggttcagtgcaactaaagtggctttcatcaactatcaggtaatcagtttagggcagatatctaaagctaatgacaactcatttattaaaatcagtgaactgagcacagatgatctgaaccgattggccggttatgatatggtatttatcaatgccatgggattaaggattactgaagagcaacgtgcgcaaatacaaaaggcagccgatggtggtctgccggtattgactactgccgctaccaatcctgcaaacaagattatttcattggattccatccaagcggatatattgaaacattatctgtctaatggaggacgtcgtaactatcgcagtatgctgaattatgtgcgtgtgcatattgataaaaaactattctctgtgtctgaaccggaagccgtaatgaaacgtgccgatgatgtgctttatcacatggatccaaagaaacccgaagacgaagagttgggtttcaatacggtagccggatacaatacttttctgcaacataacggcttgtggaaagagaatgctccgcgtattattgtgaccggtccgatgggtgaaccttccgggcttattgctaaattggaggaaactggcaatatggtttatcctatacgttccatgcgttcttttattcagaaccatggaattgattctgtccgtccgtctgctattatcaatatggcgcatggacgtatgggtgaacctattgtagattatctggcgaaacagaatataccgcttttctctccattgaatgtaaatcgcttggtagaggagtgggagagggacaagatggggatgaatggcggctttatgtcacaaagtattgttactcccgagatagatggagctatccgtccgttcgctctttttggacattataaggatgaggagggtttgcaacacgcttatgctattccagaacgcttggaaacttttgtagaaacagttaataactatattgctctgcagcgtaaacccaatagtgagaaacgcgttgctatttattattataaaggtcctggtcagaatgcactgactgcgggtagtatggaagtggttccttcactttataacttgttgcagcgtatgaaacgcgagggctacaaggtggacggtttgcctacctcttcgaaagaattggaacagatgatacaatctcaaggagccgtatttggttcgtatgccgaaggagcttttgatcggtttatggaaaccggcaagcccgaactcataacaaaagaacaatatgagagttggataaagaaatccattcgtcctgaaatgtatgccgaagtaatagctgccaatggtgaatttcccggagcatatatgactacttccgacggccgtttaggagtagctcgtttgcaatttggaaatgtggtgctcttgccacagaatgcggccggtagtggggataatgcatttaaagtagtacatggaaccaatgcagctcctccacatacttatattgcttcttatctgtggacacaattcggatttaaagctgatgcgttgattcatttcggtactcatggcagtttagagttcactccgcgcaaacaagttgctttgtgcagcaatgactggtccgaccgtctggtaggtgcattacctcatttttatatttattccatcggcaatgtaggtgaagggatgattgctaagcgtcgttcgtatgcgggattgcaatcttatcttactccaccttttatggaaagtagtgtccgcaccatttatcgtgaactgactgaggctgtcaaaacatacaataatttacttccggccgatgggcaggctgtactgtctaccggaaataaagacgctttgaaccgtgcttcattggcggtaaagaaactcacggtgaaactgggcatccatcgtgaattggaattggatagtcttcttactgttccttatgccgaggaagatattcagcgtatagaaaattttgcagaggaactggcaaatgagaagattacaggtcagttgtatacaatggggattccttatgaacccattcgtattacttccagtgtgtatgctatggctaccgagccgatagcctatagtctgttggcattagataaactacgtaatcgtgcggacggacaggtagagaaacatcgcactctttttactcagcgttatttagaacctgcacgtgatttggtcactcgtctgttggctgatccatcgttggcttctgatgaattgatttgccgtattactggcattacttccgatgaacttgctaaagcacatgaaatcaataaatcccgtaatactcctcaaggcatgatgaccatgatgatggcattagctgaagaggctccggctgaggctaaaacacatgctgatatgagcagtggaataatgcaggctgaccaaagcggatgttcgaaaaggaatagcatatccgggtctatgaaagagaaaatgaaggaaatagcgaaaggtatgaatcctgagaaagctatggaacttgcaaaaaaaatgggtgcaagccctgaagctttaaagaaaatggaaacaggaatgtacaagagtcgtgctgtaggtatgaatacactggccaaagatacggttacaatgaaaacaacttctcgaggaaaacgtgaaaaagcggatagtgataaattcggaggcatggaagcgatgatgaaagctatgatgtccaagaaaaaagaatattctaaagaggagatgaattttgctttggctgtcgtggaagtagaacgtaccttgaagaatgtgggcaattataagagtgctcttttggaaagtccggaaagagaattgacctctatggtgaatgcgttgaacggaggatatacgcagccttcaccgggtggtgatcccatcgccaatcctaatacattacctacaggacgaaatcttttcgctatcaatgctgaagaaactccgtcggaatctgcatgggaaaaaggaaaacaattggctgacaacactatcgaaatgtatcgccgtcgtcataatgactctgttcctcgtaaagtaagttatacattatggagtggagaatttatagaaaccggcggtgctactattgcacaggtgctttatatgctgggtgtagagcctgttcgtgatacgtttgggcgtgtgacggatcttcgtctgattccttctgctgaattaggccgtcctcgtattgatgtggtagtgcagactagcgggcagctgcgagatattgccgcttcacgtctgtttcttgttaatcgtgccgtagagatggcagccaatgctagagaagatcaatttgaaaatcaagtagcagcaggtgttgtggaagctgaacgtgtattaatagaaaaaggtctgactccaaaagaggcccgtgaaatgtctactttccgtgtgttcggaggagtgaatggtaattatggtacgggtatacaaagtatggtgcaatctggtgaccgttgggaaagtgaaaaggaaatcgccgatgtttatttgaataatatgggtgctttttatggtagtgaaaagaattgggaaactgttcgccaatttgctttggaagctgctttgacacgtacggatgcggttattcagccacgtcaaagcaatacatggggtgcattaagtctggatcatgtgtatgagtttatgggaggtatgaatcttgctgtccgtaatgtgaccggtaaagatcctgatgcgtatctgagcgactatcgtaaccgtaacaatgcccgtatgcaagaggtgaaagaagctattggtatagagagccgtaccacaatattcaatcctgcttatattaaggaaaaaatgaaaggggaggccggcgcagctaatacttttgctgagattgtgcaaaatacgtatggttggaatgtcatgaaacctcaggctgttgataaggaaatgtggaatgagatatatgatgtgtatgtaaaggataaatttaacttgggagtgcaggattattttgaaaagcagaaccctgccgctttggaagaaatgactgcggtaatgatggaaactatccgtaaaggaatgtggcaggctagcgggcaacagatagcggatattgccaaactacataccgatttggtgaataaatataaaccgtcttgttctggttttgtttgtgataatgctaaattacgtcagttcatagcttctaaaacggatgcacagactgcatcccggtataaggaaaacatcagtcagatacgtgaagttgctgcttcaaaagagcaaaagggtatggtgatgaaaaaagaagagatgaatacagtcggtacggaacaacagacgaatacggtaagcaatactgttgtttgtgttgtagtggtggctgcagttcttgttttaattgtattggtgcgttgtcgccgtaaaaaaatgcaggaataacaggctatggaaacagttgtagttgttcttatgatattggtctgtttcaattttatgatgaaacagacatttcgtaaacgaggatcggttgcagcaatagctgttgtagccaccctctttgtgggactgatgtggccatatgctattcagcagtctaagacacagattgctgattggttggcaaatgtccaattgatgcttgacacttcggtggtgcttacagtggaagttgccttacagatggctttttgtatgttggctgttcatgtgcttactacagggcctgttaagaaacgtactctttgggcttaccgtgctttacgttggtttccggggattttgatatttcctgtcttgtttagcggattggtatatcttatcttctcttttccgggtgtttccttttctcttgtcgcatggagtatggcggcaggtgtattgatattgatttctgcaggcacattgtttcttcgttatcttttgccggaaaaggaattacggttggagctattgttcctcactaatgcattgaccgccatattgggaattattgctactgtaaatggtcgtaccgccgtaacaggtgtaagcgaggtggattggggggcattgaccggcttgataattatgctggcaggtggaggactcattggattggttatatataaatatagacgaataaaaacaaacatttaaaacttactgacattatgaatcttatatcagacattctgttttggatttcgaacggacttttagtccctgttgttgtattgcttattattcttttcatccgttcgctattattgataggcagttttttcgggcagtatctggctattcggcgtacggatgcgttgttgcgtcaacagcttgatacactgactatagatactttgcccgaattggaaggcaaacttcctgtgaagtcgaactcgttggtcattgcgtatatccgtcgggtgttggagtcaaaagaccgtccggcacatgtgcagcgcctgttggctgattttgaaattactgctgataaggatttggctatttcaaaaacattgaccaagatgggaccgatgcttggattgatgggtacattgattccaatgggacctgctttggtgggactttctactggtgatatcgcttctatggcgtataatatgcaggtcgcttttgctacgactgtagttggtctgttttctagtgctatcggtttcataacccagcaggtgaagcaacgctggtatttacaggatatgactaatctggaattcctttctgaattgctcactgaaaaacgtacagcttgagatgaaacgtaatttattaagaaaagaggaggatagtgacccgatgagcgtggtcagcaatctgtttgatgtggcgatggtgtttgctgtagcgttaatggtggccttggttacccgttataatatgactgaaatgtttagtcaggaagattttacgatggtgaagaatccgggtaaggaaaacatggaaatcataaccaaggaagggcagaagattaaccgttataccccttctgaggatcaggatgtcaaaagcggcaagaaaggaaaaaaggtgggtattgcctatgaattggataatggagaaatcatttatatacccgaagaataaacttgtataaaggaaagggaggataaagttaaaactagaacttgccattttatatagccgaacagaatttatttgagaaatatagggcaaataaagtaacttgacttcgtgagccaagtaagttaagtgaaagtgtcaagtaagttaagttacttgcccaatgcacttaagttacttttgaagctatcggggattcatccatcctatttcccacaagttaattctgttcggcttttagtttgaagtacctttattacatacatatgtgtggtccgatatatatatgtatgtaataaaggtattttccctttttctagtatcggttgataactttttttgctttgtttacggcagtggtaggagaaatcttatccatgcttgattcatcaaacattttcaaggttttgtctatattcttaatagctcctttattgcctttttcttcaaattcttctttcagaatgcgtactttctcaaaaaattgtattccttctgtcaggcgttccagccggatggatgaacgggcgcccggataaatcatatacgtgtctccggcagcccaagctgtgaaacggctgtcttgtaggggatttttcacccagctgtttaaagcccaacgaagatatccgtccagattttctttcgcactatgccatgccagccattcagcttcggcaggttcgctgaaagtgaaagtgttggggcggggctctgtgcagcaggtataataagtagttactttgcctgccttccggcgcgcttcaatctcttcgggagtaaatttctcggcaatggtgatacaatagtcattcagatcatccaatagttctttgtgataagttcctgccaaagaaactttaaagtctttatcagccttacggatcactttcagtgtttcctgcatgtccttcatcgggcgttcgtccatcgcaatgtgagtgatatcgaaccagccttttgctttcagatgctttgagaaatcttgcagcatattcatccaaaattcttcataagcaacttcacccggtttggcgtccagaaatttgaaagagttgctggcctgatcaaaatattggaaagaaaggcgccagggaaccatagaatagcaactgatttgttttttgacaccaagatccatcataaattccacccacttgtcgaatacggtatagtcaaaataccaggttccatccgcttttttcaaccaagtgaccatgctttcaaaagcatcataggtctgtccgttccaaggcttgtgcataatggaggctgtgattaccttaccacctgcatcggcatacagtttcatcaatgggcgcatcaaatcgaaatgttttttgctgaacggttccacattgtagtaacgggatactgcataagggttctgccataaatccagatggaaagtccattcggaaggaggaggcagagtacggttcttcacttggaggttcagttttaattcagacaaggtgataccgtcggctttcactgtgacggttcctgtgtatttcccggctttagtgccctgagggatgtttacgctgatccatcccccttgggtggagttggcgggaagggttagagtaggagtgatatggtctattacatctgctactaaagttgagtcaaaatcagcactgtttcgatagccacatgcgcccaaaccgtctttgttcagttcatcggttataacgtaacggacaaagcctgttcggatattctctttactgatggttgcactgcctgaggttaaatcgctgaccatgaaagtcaagtcatttagcgatttgggagtccatactaccagttgggctgaaattttctcacctttccatgcagtaagattcatacttttctgcgcactatggatgggagccggttcctctttcttatagcggatgtctgtgcttccccagctgatttgtggagctgtaactttcgcccataaagcggggttggtggcaataggattggctgcttcctgataatattcggaagtttgggcgttcatacatactgttgacaacaggagagcgcctagaaataggagttttttcataggttatataatagttagttgaagttacaaaggtaactcagggagagttaatttccaaataggaacggtggagtttgcataattgcataggaatatttatttttgacgagttataataataaggaagatagagatgaaaagaatggtaaatgtgctttttgctggtgtactggctatgactgtactgtcctgtggcgaagagaaaaaaggatatactctgaatggagaaatatcggatgttaaagatggaatggtgtatctgaaaaaatatcaggataaatcgttcatagctgtggattcggctgtgattactgacggtactttcaaatttgaaggtgtttgtactgagccattggcttatgggctgactacgtttagggatagcaaacgtccgttggtattctttttagataacgaaaagatgcagttgaagatgaatgaatcagaaaagatactgacagtgacaggttctgccattaatgatctgtatgcacaaaatgctcctttgactcgtcaggatggatatagcatagatagtctggttgctgttcacccggcatctgctgttaccccttatttcatagtgaaggatttcgcttataagttgaatttggaagaaatgaaggcattgcgtgccaaactggatgcttcattggatgaaaccatgtatgtcagtcaaatagatggctttatcaagcggatggaagatattcaggtcggtgctgtggctccggattttacattgcccgatgtagacggtaatcctgtcacattatccggtttgagaggaaaatatgtactgattgatttttgggcttcctggtgtcctgattgtcgcaaggaaaatccgaatattgttgctgcctggaataaatacaaggataagaattttactattttaggagtttctttggatcgtaagaaagaaccttggttggccgctattgagaaagatcaattggcatggactcatgtttcagacttgaaggactggaaatcggatgcagccgtgcagtatgctattcgttggattcctatgaatttcttgttggaccccaatggggtgatcttggctgtaggattggaaggggaggctttgcaacaaaagctggatgaggttttgaaataacaagtttgctgtaagattatgaaaataaatgtaccaaaagccaggggttactgttggttctccattggcttttgatacattttgttgtctttgttcacatcattgttctttctctttagtcattatcacgtccgaaggaacagaaaatcctatcagttctgtatattcatccggttcttcaagggctaatcctaatttttcatccagatgccaacgaattttatcggaagaaagcagaagtatttttccgcctaatatcccttttccgccgaagtgcttcttccgttggtcgtaaaataaaactccgactcgattaggatcaatgtagtccaaactggtagcattgtttgaagcccagatagaaaaatcttgagttcccttttttttgtccaagtgccaaatagtatctctgatactaaaatagttttctacaattattcccttcactgatagaaaatatcctcccataagaccatttataatcatgtgttgatcctctgcatatccttttttaagaactattttaaaaatcgtatcatttgactgatacatccaagtcccgatataagcatccaagttttttgttggagcaatttccttttgggcaaaactaactgtgctgataaaaaacaaacacaaaacaaattctattcttttcatgacttttctttttattggttacattccatatttacagatttcccattagaagctagttcctgagcattccaagtcggattgctttcatcaatattcgaactaaacatcactgacagaccggagttattgcgatctaaaaatttaagcaactgacctatacattcatcaactccccctccgcttgcaccaactatataagcgttccaactttcggaaagttcaccatttcgaactttggtagcgaaagtattaaaatctgtgggagaagttatcataatactcatacatccgaactctgaaactactccataagtaaaattctctgatttcacatatccctgttggtatcgtatagctaaagcctttaaatctgcccatgaagtaatcatagagcctgtagggtgggaatggtaccattccatgatttcttttcctgctatttgatcatttgtgaatttggcacttcctgattcttgtacgttcgggaaaatagtttgcccgtctgaagtctgtataaagccttgctccacagtattgcctgcggaaaatgtttttctatacacatcttttatacgcgatttaaatgctgcgtcctgcgacaatgttttagcacgtttacaaggagtaggaggtgtttcaggaggatttgaaggaggattatatccaccacctccgccatccatttcgtcatcatccaatgaaacgcaaacttcatgatactcaggatgtaaatacttgtcgcaaattacatcgatgccgggcagccccagttcatgatcccaaacgatatcattatgacaattccgcttttccatccagtctatttccgtattacatacggattgtcctcttcctctttgcaaactcatacggtatccttcctctgttcccggagaaatggaggctgttattttccctgattcatatttccaaccatttaccaatccataattgaaattgtagaataaaacttttccatcaaaatcagcttcacgatgtaaataagaattgttttcaaaagaggtggtatgcatcaaataatcataagtacctatgaataccatgatgaagttgtaaatctcacctgtttctagattcttcaatattaccatgcgtgctacattatatattttatccaaatcatcttgtagttcatatttttcttttgtctcgttatccataaaaaatgtactaccgcttgtcattagagtcgtttcgactacctctaaatctccttttctactttctttagccttgttccaattaggctttgctggaattcgcccgtcagcacttaaggatctaactgtagtagctgaggaattggtggcattataccattgttctgctttagcaatggtcaattctttattgctgtcaaaaataacttcatcagttacattggaggaccattcatcttgccaacatgaataaactatcatactgacaaaaaccaaaatgccaacaatagaaatttttcttttaagtgtttttcgtttcatagtatctatttttgatttgtggttagtatgggttgagaatatttgcaataatatcaaaaaaagtaactttacaaaacccttaagtaaaaagatagttattagagagcctttatttaaaagccttcggcttcgaagctatcttttttcgaaagtatctgtaataagcgttagtgccccatctccggtaatattacaagctgttccgaaactgtcctgtaatgcaaaaatcgtaagtagtaatgccgttccggcttcattaaagtgaagaacagagatgattagccctaaagaggcaagtactgttccccccggtactcccggtgcaccgatggcgaataatcctaataacaggatgaataaagtaatttgtaatatactgggcatacttccataaagcatttgggatacagtgagtacaaatacggtttctgtcaggatagagccgcataggtgtatattggcgaataaaggtatcgtcacatcactgatttcttttcgaaggatagggcttttgcgggcacattccaacgccactcccagcgtagctgctgaagacattgtacctaatgctgtgaggtaagcaggaccatagtatttcaatacctgccaactattttttcttgagtaaacagctgcaatgaaataaagcaatgacagccagatgaaatgacaaacaataacaactatcaatacggagaggaataccggtaactgcttcgtaacagctccctgatagctaagaatgcagaagttagcggcaataaatacgggaagtacgggaagcagtactcttttcaccaattcaagtaccatcttttgaaaagtatccagtagttttgatatttcatccgatttaacccaagcagtagcaagtcctatcaaagctgccagtacaagggccgtcataacattcatgaccggtggaatatctatttttagtaaattttccggcaatgctttcagtgtattggcatcatcggctatatgcagaaaaggaatcacattgtaacctacggctgctccgaaaaaagaggctccgatagatgataggtaggctatgctgaaagcgaataaaagcatctttgatgcattgctgcgcaaatgggcaatagagggggctatgaatcccagaataataaggggaaccaggaaaaatataatctgtcccgtgatgtgctttatacagataacgacttccagcactgcgtcattaacaacaaagcctgccaacagtccgataattacggcaataagcagttgtacgatagtattacttagaaactttttcatatatttttttcagttaaacgatgaatatccggaaaaagtttgctgtataggtatgttatttcatagcttgaacaaagatagaaaaataaaatagaatgccgtatgaaaaacagaaaaagacgggaaacatcacgctccccgtcttatgaaatctttttgccttatgctaataccttgattaagtgaaatatttaaaaatctctcttataaataatagttgttactgaaatatgaattaaaagttgtttttacctgtgtcccaccatagccgtgtaccgccattgtctgcaccaccaagagccgtacacagatttttatactgctcaggatcttttttggcatcatcttgtgagaaggggaggcggcgaatcatgatgtctgtatcaattgtaccattgctgttgttggtttgtactttgaataatttcggatatccggtacggcgctgttctgcccatgcttccatgccttctggccagcaagcaatccatttttgagtgataattttttcaagttgttcttcttgattaactgcatcgtcaaaattgggagtggtggttattaatgctttcatgtcttttccggggcctgctgcgtaattaatgtaatctgtcggtttacctttacttgtcagatataggcttgcatctccggcaccccattggctgaatgaagtttggacaccggtttcataacattgctttgcgctttcgtttttcggattgatacctcgtaaagatgcttcggcacgtaagaaccaagtttctgctgctgtcagaagaacggcgggtgtggatgctgtgattgtttgggtgttgataaaggaatagctttggtaataattggggtcaccgtccttggcatatactccttgaggtactcctagatattcctctgtatgctctgccaatgtcgccggattataatatatactgatgcgtggatcttcataaccgtttaggacagaagctattgttgctcccatataggtttctccccaaccggcaacacctgctaacgggttttgataccccttaccggagatttgtatgttttcatcagaagattctatgacaccataagagttttctaatgcttttcgggcttcactggtagcaagtgtcttatttacattagatacgcgcatagctagacgaagacgtaatgaattggcaaattttatccatctgctggctgtaggacaattgcacatattaatgcttttcacgccatcttctttgccgccttctttcaaataagtatccaatgcgtctacagctttatccagatcatcaaagaatgctttataagcttcttcttgggtatcaacagagtttgtttcgttttttccgaatttagaatagacaatagggccataagtatcagttatacggtgcatggcttctacttttaaaataagggttgcaccataaaaatgtttgtatttggcttcatcttgtgtaattaatgttgatttatgggctactggaaatatataattataagtataattccacgcactggctgtccatccggcctctaatgcatatactgtatttttatcgctgaatttggaggcaaaatcatgaaaatatcctgagaacatatcatgattcaagttttggaatgtctgccaaggccaagtggtgccttctccccagtcgtagttaaaataaatacctttttgaattgtctcaaagttagtagtgtatttttggaaatcatattcttttacagtatcatcaaaactaccgttgattttattgtcagattcgaatccgtctgtgcatgaggctaaactcagaaggcttcccacgcataaaattgaaatatattttgaacttttcataatgtctttgttttaaaattagaatgtaaatttaacgttgaaaccaatattacgtgtagtcggcatgccgaaaacatcaacgccctgcagagtattacctactgataaagttgcatccgggtcaaatggagcatctttgtacaaaaagaataagttacgtgcaatcaatgtgagatctaatcctttgatgaatttggttttggcaaggagggtttccgggaatgaatagcctagtgtcaattctcggaagcgtacattcgttgcatcatacatatagtattctgagatgccgttacgtcctccgactgtaccatagaagttaggaacatctttgaattggatgccttcatattccacataaccgcgatcacgggattctccggattctttgctgactcccattgcgtcaagatgtgcttgtgtcaatgacatgacatctcctccgatacgtgcatcaatcaagaaatacaaagtaaatcctttgtaagtaaaggtattgctccatcctaataaagcatcaggattagcattgcctagtaaagtattgttacctgtaactttgattggatttcctgtctcgtttaatttaatcttaccattttcatctctttcgaatccgtttccataaatatctcccagttttccaccttcttttacccacatgtcataagccatggagaatccttcagaaccgtagcggaatgatttatagtccttgtgtaaggaaacaactttgtttctgttcatggacatgtttacagcggttttccaacggaaattttcattcatcaaaggagtaccctctagtgtcaattcgataccagtgttacgaattttacctgcattgatataacggaacgcataaagtgaaccagccggattggctactcttaacagttggttttttgtatctgtacgataccatgtaaagtcaattccgaagcgattattgaaaaacttccattctgtaccgaattcaatggaagtactgatttccggtttcaaatcaccacgttgttctatatcgtttgtttggatacttccaccacattgaatgatatcagctaaattggtgatgccgatgggaaggtcattgccgacctgtgcaaatgaaccacggaattttgaaaaattgatccattccggtagtttgatgctgttgctcataatccaagtcaaacctactgacggatagaaaaatccatttttcatactttctgtgtttgccagggtggaagaccagtcattacgcgctgtaatatctaaataaatagcatctttccaacccacttgtgctgtaccaaataaagattgtatagtacgtttcgcatcaattgtttggttgatatatccctttgaagagaatatgatattggaaacggtaaatacattaggacgatataaagatgctgttttggagtcgatcattaaagaattggctttgctgacgttaatgctggttcctaatgcggcattgatggaaaaatcatcaaaggttttgttgaacatggccatgaaatcaccatatacttggaagttttgttcatccgaccatacatagcgtccgttaggtaaccctgtttcatcattttttccggcaatgtttgctgctgttgatgcatacatcttgttgtcaaacttatcacttacatagtctacattcccgcgtgcctggatacttaaccagtcagttgcttttatatttgcactgatagaagctaatgcacggtaacgtttactcttgttggtcacacgattttttatccagtacggattctgatcccattcgctgaatgagccgtcttcattttttgtataccaattctgtaagttcatattgcggtcagtatcgaaaacttcaaagttttcagcgtagggagccagatcggcaccacggggaaaagaatacaagccaaccagcggattcagataataaccacctccggcaggagtattacggatagtttgtgtcatcaaactggcatttccgtccaattttaaacgatcattaaagaaactggctgtttcacggaaagtaatattgtgcttttgaagcttatttgagtccacgatacctgtcccccgggtattggcataagaaaagtaagtttgcattttgtcattacctgtttggaaggttaaagagttgatggctgtaataccattgccaaaccaattacctacgttatcatagtctgtcagatttcctttgtcgccccaactgctggtaccatcggcagtttgtccataattgttttgaaattccggcaggctgacagcatggtctactgtcaggttagaggagaatgtaactcttgacataccggctttccctgattttgtagtaattaaaataacaccgttggcagcttgggagccatagagagcagcggcagatgcaccttttaatatactcatactttcaatatcatcagggttcaagttggaaacaccgtcaccagagtcatggttgaccccgtcattttcacctcccataacggtggctgttgattctgttgtgatattcagcataggaacgccatctatgacatataacggttggttgttaccactggcgaatgctgaacgtgcaccacggatagatacttttgccgaacctcccagaccggatgaactctttgttatttgcacaccggcagatttaccggctaatgaattgatcatattagcgtcctttactttattcagttcgtcaccattcagttgctgagtggaataagttaaagaggcttctttctttttaatacccatagcggttactacaacagtttccagtttcaatgcatcatcttccattttaatggtaaaattagtctttccgtttactggaattatgacttttttataaccgatataagatataaccagttgtgcatcagccggaacttctaacgtaaagttaccgtcaatatcggtaattgtaccgttagtagtaccttgttgaataatgtttgcaccgataattgcttcaccttgcatatcagttatagcacctttaacagtaattgtattttgctgttttacttcctcacgggctatattgctttcttttgtcaaaacaatgtttttaccttccataacataagtgataccagttccggaaaaaacttcatctagaatttcggatacggctttattttttgcgttgatttttaccttgcggcttagatctacatttttcttactatagacaaacaggtaattagtttgtgattcgatggcagaaatcaattgggctaccttcatgatgttggtatccagactgactttggcgttctgagagtgtacatccatactgaatgcgctgaatgctgtggttaacagaagaattaaggtgatcttcatagttcgtaatatttgtttaaaagctaaactttttgggcataagtacccttccaaagaaatttttctcatatctttgtaatgtgttaagttaataaatttgattaaggtcaattgttagctgtcgaatcggggagtatgggggtactttccgattcttttttcaaaggtttttatgtaatcataacagttcattttttaaggttaaacttctattgtgattttattctatggttatcttgttatgttcattatcaatattgtatttaaacggatggtctttttgtataacttttagtatatgctctatgccgtccaaatctttgaatttaccagtgcagcggtagttctctaagattttaggattcttcactgttatcttataattataatatagagcaatcttgtccagtaactctttaaacggaacatcatcgaaataataaatgccttgcatccatgccaaagcattgttactgctcatttcgcccgttttgtatttgccgttttccattgagaaatactttccttttgtcaggctggtaattggcttttcttcttttgcattgttggtaagcaagttgatggaaccttctatcagtctggctataaagctgtttgaacctttataggagcatacatcgaattttgttccggtgacttgcacctttatgttttctgtctgcacataaaaaggaatctccttattgtgtgccacctcgaaataggcttctccgtctaacgtgactttacggtcttttttaccgaagtcttcatcataagttagtgtggtttgggaattcaaccatactacagaaccgtcaggaagatccatctgtgcacgttgacctgctggaatacggatggtttgtgacaattgttgtttaggtttatgcatatgtggcaaatccattacaaaaacaatagccagcatggcggcaatggcaatcagtgggtacaggtacagatgccctttcggtttccgttgtatgttcgaaccgtcagaaaaaagggttacatcaaacagcattcgctcttttagaaagtgttccttgttttctacactgctttctacccattccacaatctggttttcctctttttcggtggtttctcctctgaaatatttatgtagcaattcggttttcattctttctgcattttgtatatagaacaggatagctggaaacaaccctagtggaaaaatgatttttttttcgattttctcaaaaaaagtgctttttatcctcttttttcatttcaagtaaaattattacccccctgacacactgctaataaaaaatattagtaactttgcaacacccaaaataagcgagattgtatttatacactataaacaaaaataagagattatgatgacaattgacaaattcaactttgccggtaaaaaggcaattgtccgtgtggacttcaatgtacctttggacgaaaatggtaaaattactgatgatactcgtatccgtggtgctcttcctacactgaaaaaagtgttggctgatggtggcagcttgattatcatgtcacacatgggtaaacccaaaggtaaggtaaatgctaaatattcattgagccagattgtcgatgctgtttctgaaaaattaggtgtacctgttcaatttgctcctgattgtgcgaaagccggtgatgctgcagctgctttgaaaccgggtgaagtcctgttgttggaaaatttgcgtttctatcctgaagaagaaggaaagcctgttggcattgacaaagaagatcctgcatacgaagatgccaagaaagcgatgaaggcttctcagaaagaatttgccaagactttggcttcttatgctgattgctatatcaatgacgcattcggtactgctcaccgtaaacatgcttctacagccgttatcgctgactatttcgatgcggacaacaagatgttggggtatttgatggaaaaagaagttcaagctgttgataatatcctgaaagatatcaagcgcccgttcactgctattatgggtggttccaaggtgtctactaagattggtatcattgaaaacctgatggataaagtggataacttgattctttgcggtggtatgacttatacttttgcaaaagctcaaggtggaaaaattggtaattctatcgtagaagatgacaaattggatttggctcttgatatcattgctaaggctaaagctaaaggtgtgaatttggtattgggctctgattgtgtggctgctgatgcattctctaacgatgctcatactcaggttgttcctgcaaataatattcctgacggatgggaaggtttggatgcaggtcctgaaactcagaaagcatttgctgctgctattgaagatgccaagactattctgtggaacggtcctgccggtgtttttgaattcgataactttactgccggttcacgtgctatcgctgaagctatcgcaaaagcaactaagaacggtgcattctcattgatcggtggtggtgactctgtagcttgtatcaacaagttcggcatggctgaccaggtttcttatatctctaccggtggcggtgctttgttggaagcaattgaaggaaaaattcttccgggtgttgcagctatcaaaggtgaataattaattttctgctatatataaaaaaggcagccttttcgaaagctgccttttttatattctttattttgtacttttcagaacatgaacaaaactgttgctaccagtctgttgtttgaaacagaatgagtatcaataatttttccgttagaacttttcatggaaccataccatgcggaagtaagattgtattcaactcccaatttccagtgaggcacattataggttagttctgcgctggtgcttaccaattggtctacattggttcctgtaccatacattttacttatttcgtcactcgttcctaaatttttcatataacctaaaaaaacagccggtttccatttcttaccgtatgcaatgttcagccatgaactagaattccggttgggggaatactcttgttctcccgtacgggcatcagtggattttacaccgtatccgcccagcatggatacttgtgtaagattggaacccaaaatactttttgctgccacataccataggggagaagtatatttcatgtgaacttcgtaagacagggcagtgacacgttcatccactttgtaaacttcatcttctactaccgattgagtacgaggttttaatgaaatcatttcaatgcctgctcccactagccagttgcttcttttgtaatctgcaccaatatagatttcgggtatacaactttcttttatgtatttctggcttttcccatcaggaccttgagacaggtattgggattgccaaatagccgcgcctgtcagttgtatatcaccagctttgtagcggaatcgtatttgtggggcacggctgaacggttggaaaggagctcccatattcagattcagaatttgtggagcaacgtcaccatataacggatgccaggtttgtcccaacagtaaagacggttttccccaatcaaggtttaaataggcatggcgcagacgtacagtggagaaggttgttcctgatccgcggaagtccatttctacttttgcggaggtttttgctcttcccaacttgggaccttgcacatctattcccaaacgggtatataaagtataaaagcttccattagctgtcgcattcaggtctttacctgttgcatcgtacactttatctttaggatacatatagaagagcccgtcaacagtttcttcattggcacgactattgtaatagaagtcggtgcggatttgtccgtagaacttgtaattgaaatctttgtcttgagcaaaactttttgccgatagcagtaaaaatgtgaataaaaataaatattttctcatattttaaagggttattataaacagtcggcaaaattacataatttatttgaaaatcgcacgtgtgtcttggtaaaagaattgtgcgcctctacatataaagtctgcaccgatacaaattatttttgttgcctcattcaaggcaacatttgaatcttgtcgtattcttcatcagttacgggttctaaccattcattggatgtgttttctccggaaagttcgaatgcaaggtgggcgaaccaactgttggcggctgcaccgtgccaatgttttacgttggcagggatatggatcactgtgccgggaagaatctcaacagctgctttaccttcctcttgataccagccacgaccggctatgccgataagcatttgtccgccaccttgagttgcatggtggatgtgccagttgttacggcagcgtggttcaaaggtgacattggaaatgcttacctgttcacgagagataggggcgaggtaactgttaccagtgaaatattgtgcataagcggtgtttggttctccgataggaaaaatcatttcgcgttggaacgttgttttttcatctttatctttacaagagatatcttcattccatacttctttggcaagacggaatgccgcccatgctttcggccatcctgcatagaagccgatgtgagtgatgatctctgcaatttccgtacgcgtaataccgttgtttttggctgattggagatggaatgtaagcgaactgtccgttattccttgactgatgagtgaggtgattgtgactaaactgcggtcacgaagactgagttgctcggtgcggctccacacttctccaaaaagaatgtcgtcattaagttccgcgaatttaggagcgaatgttcctaattggtcgcgtcctgctgtctgtttgatctttttttgtgccatactggttgttgttaaaatactgaatattaaaagtaaaatgactttgttcatagcgttcatattttaagtctttcaatataaattctatgtacaaaagtatggagttgaaaaaaataagattgtacccagattacagatttttataccatttttcctgtttcgtttgttgtgctttttaaaatgaaattccattgtcatccggctaagttttcaatcaggaaatagaaaacaaggttttgagccggattacaatggaatttaattctccttatataaataggtaattaatagatttctatttcgtccaaagctattgtgctgggtacctcgcttttatcatgcgggctatagcaatcaattccattgcgtattttacctccgcttgtaaattctatttttaccttcaccgcctcttgtgccggaaattctatttcttcatcaaaacctctgaacgtattttctttgatatcgtaagtgaattctttttcggctactttctcgaatttgttgtctaaagaggaaacatagactacagctttgctcaccggcaatattccacctgctgcattatacaatgtaccgaatctgattttacggatagtggctttctcaaagtctactataaaagtaactttgtcattattgtctgggctgatacctacccacggggtggaggaggcattatttccacgttttccattggtcagtcctaaagtcacagtgtctgcgcccaatatatcattttctcctaaaatatcacctttcatacctttgggttcgggcatgatttcatattttttcccactgattaaattcttgtaaagctgtttatgagtaaccttaccgatttgtttgccgttaacgaaagcagcggctttcaagtcgtatgtgccgtccaatgggaatggacgattgtataagttggcatgtatggatggttgttcaccatgagtcgtataatagatttgtgctcccggatagaatgtttccagctctacattcagtacaccttcttgggtagcacgggtgttgatatttacatcaaagaagttgaggcaaggttttacgcccattgcttccagacgttggaagtcttcaaccatgcggttgcagaatgaagtaaaattctttttcttcatcggagtccagccggtttcggatatagcgatcaggcgtgggaagatttgataatcacggttatcctcagttggcatatattctgcccagcaattggcctgtacaccaatgatgtgctgttttaccaaactgtctgcatcagccggtactggattatagctgtatgtctttttcagtgtgttgtatccaccgatagtaacaggggctatttccggttcttcctggtaatggtcaaggtaagcgtaaggattaggagtcataatagcatcatgtccggctttggctgcggtcattccgccttccacaccacgccatgacatcactgtggcgttgggggcaagccctccttccagtatttcatcccaaccgatgatattacgtcctttgctgttcaggtatttttccacacggcttacgatataactttgtaatttctcttctttcgtatgctttcttccgtctacgggattgggagtgatatcattttccaatcccagttcacgtatcagtttttgacaatgttcacattgttcccaagctgttttaggacattcatcaccacctatatgtatataagagcttgggaataattccaccacttcgtccatgactccttccataaactggaagaaggtgtcggtagggcagaatacttggtcaaacacaccccataatttgcaaacttcgtaggtgctgtccggagtacaggacaattcagggtaggaagcgatagcggccaaggcatgtccaggtaactctatctccggaatgacagtgatatatttgctttgagcgtatgcaacgacttcttttatttcgtcttgtgtgtaaaaacctccgtggggctttccgtcatatttgaatgggtaatgggtatagaaataatccaccatggtttctgaacgttgagagccgatctcagtcagtttggggtattttttgatttcaattctccagccttggtcgtctgtaagatgccagtggaaggtgttcattttatgtgcagccaatacatctatgaattttttgatataatctatagatgcgaaatggcggcatacatccagcatggctccgcgatagcggaatgtcggggcgtcttctatttcaacgcaaggtacactccattcggcattacgtgctctttctttacaatagacatccaccggcaacagttgatacagggtctgtaatccatagtaaaagccgttaggcgccgatgcggtaatttttatcagttgaggggtgaccgataacttgtaggcttctttttccatccccggaatgctgtcaaaaacaatggagggtacattttcatgtaactcgtcagtcggtttcagcttgagaccggctatatccaggagagtggttgacaggccggaagcaatgtgtttcacttcttgtgaggcgttaacgacgataggaacatcactgttcaggtaaaaacgtccctgctgctcgctcatggtaacaggcaatggaactacattgtactcattgattacttctttcatttggcatccacacattaataacccaacgaaaaatactggcagactctttttcttcataataaatctgtgttaagtttttaaataaagggggtatagaaattctttttggacaaaaatagcaataaaaacggaataaacatgtttttcagagagattaatatgtttacaatataaaaatatttttcacagatttgtttctttattgctaatagaatgctatctttgtccgagttaaccaatttattaatctaacgcgcatgacagcaaatacccccaaacggttgcttgctcttgacatcttgagaggcatcactattgcaggcatgattcttgtaaataaccccggttcatgggggcatgtgtatactccgttggagcatgccgcctttaacgggttaacccctaccgatctcgtttttcctttttttatgttcattatgggaatatccacctatatttctttgcggaaatataattttacttattctcatgctacattacggaagattgtgaaacgtacagtcgttattttttgtatcggtctgtttttgaatcttctggccaaatcggtttttacacatcatctgaattttgaagagttgcgttatttaggagtcatgcaacggcttgctataggatacggtgtgactagtctggttgctataacggtgaagcataaatattttcccgctatcattttggtgactttggccgtctattttcttttattggctatgggagacggctttaacttgtcggccactaatatagtggcccgttttgatgtatgggcattgggtacatcccacatgtaccatgatggtggaatggcgtttgatccggaaggactattgagtacgcttcctgcggtgtgccatgtaatggtagggttttattgtggaaagttattgttttctgctaaagataatgacgagaagatacaacggttgtttttggtgggtacaattctcacatttgctggctttttgttaagttacggctgccctatcaataagaaagtgtggtcgcctacttttgtcattacaacctgcggattggcatccagctttttggctctgcttatctggatcattgatataaaaggttatcaaggttggtgcgtttttttccggtcgttcggagtgaaccctttgtttatctatgtgtttgcggaaataatggggattctattgggcgctacgggggcaagtgtctttatttatgaaaaggtactggttccggtgttgggaaattatcccggttcattagcctatgctttgttgtatgtattattttgttggagtattgttcatattttatacaagaaaggtatttatgtcaagatctaaaaacggaaacagaaaattagttaaatgaaagagacgaagaatgtttttatgtcagaactgacggaggtgtttagcaaacgtcagcaacagtttgttcagtttgcttactcgtatgtcaggaacagggaagaggctgaggatattgtaatgggggcttttactaatgtatgggagcaccggaatgagttacaggaggataccaatatttctgcgttgctgttgactgccataaaaaatcgttcattgaatcatttgcaacacttggaggtacgtatgcgtgccgagcagcatataggagatatgcggcagaaagaactggctttgcgtatctcgactttggaggcttgtgatcccgataaattgttttgtgatgagattcaaactttggtgcaggaagccattagtgaattgcctcctacaagcagggaggtgtttattttgagccggatgaaaaatttaccgaacaaggaaattgctttgcggctggatatttctgtaaagactgtagaatttcatatcacccggtcgctgaaacagttacgggtgcagctgaaggattatcagtttctttggagttttttataaaacaagaccatgcctcagttatttggacatggtcttgttcttatttcatatacaggaatcagaaactataatctgcacttaaaccgaacactttgttggtacggctatatacatttgttccgggtagtccggttccgttatagttggttgatttttttgtataatcctcataattagtccacatataaccaatatttaaattgaggtgtttgttcatctttattttggctccgactcccaaagagtaagaatcacaagaaaaactggtatctgattgatagttatctgatagtccgtagtcagtgatttgtccaccacagctgagggttagttgcttggttacatcaaactcaatacctgccaagtattcattggttcctttagtcagatatttttgtttgccgtttgccatacctgcatttttgtcatcataaaaatgatattctacagaagcgcgaagtaccggaaggaattcgtaggcggctgcgatagagagcatggctggaatatcattgggagtattcacaccgtgttcgtagggggctaccatatctttggcactgggtggatattgtaagttctttgtattgttttcgatattcaagttggtcttgaattcatatttggcaccaatgttcagtttacccagtttagcatctacaccgataacaggagtaagtccccagccggtttggtcacagtctagagcaagaggcaacaggtttgtgtctgttccttttacaatagcgttcagaaagcctttgtagccaccggtaaagtagttcattctacctccaccgaatacggaaagccattcggtagctttataggataatcccagctgcaaagagtaaatatattgtttaccgtccatggcacttgttatatcatacatatcaggagttataaccgtaggtttttctgcttttaaaccttcttgaaaaatacctgccatagctgaggcgtcgaacataggcagtccgtcatcaaaagacgcctttccacctccggcagtgatggcgaagaatcctgaaattgtccactcaccttttttatatgcggcgaagaggctggggataaccggtgcggcggctgttccttcgtaatatttttcaaaaggcttgtctgcaacagtaggacctgtggcgctaacgccattgtatgtcataaaactggcatcaatatttctagtctgataagcgctctgaatgctcaatcctacatggaatccgtctttgggcaagaaagccaggccggcaggattagataaagcaccgtctatttctgttgtagcaccacgggatagcatacggagaaaagctgcatgttgatttgtattggttaaaatacctcctgcgaaagttgaatttgaaacgattagtgtcgctgcactaattaataatagtttcttcatttattacttgattttttgtttgcgggcgcaaaggtaggataaaataacacacgggcaaaccttttgtgcaattatttgtgtcgtctattgaaaaatcaactgtttcaatagaaactatttacttggatgatgaatatcctttttttatttgtgtgattgattggtaggaactgtggaatgaaggagcgtgctgatgcttttgtgatatatttgttccggcacgcctgtccgctaagtaaattcctggtctgtttacggtttcttcactccattcagaacaccggattgaaaagaatgtagtatctttgcaactcttttactcaatgcaaaaaaaatatatgtataccaacaaagaaatatggaacgtaagttatccgatttttctcggattattggcgcaaaacattatcaatgtgacagatactgctttcctaggcagggtaggagaagtcgagttgggagcttccgccatgggtggattgttttatatctgtgtcttcactattgctttcggttttagtgtcggttcacaaatcttgattgctcgtcgtaatggagaaggacgttacaaagatgtgggtcccgtaatgatacagggagggacattcttgctgggattggcgatgctcatgtttgggctgacacatcttttggccccatccattgtccgcttgctcatttcatctgattccatttttgatgctaccatggaatttctcaactggcgtatttggggctttttcttcgcctttgtcaacgtgatgttccgtgcgctgtatattggtattacacgtactaaggtgctgacaatgaatgcagtggttatggcattggtgaatgtgctgttggattatattttgattttcggtaagtttggaatgccggagatggggattaaaggagcagctgtcgcttcggtgatggctgaagccgcttcattggcttttttcttgatttatacctacgcaaaggtggattttaagaaattcggcttgaatcactggcagaagattgacttttctttattgggaaaaattctgagtatttcgtgttttaccatgatacaatattttttggccatggctacttggtttgtctttttcatcgcgatagaacggttgggtcaacgcgagctggcgattgccaatatcgtgcgtagtatctatattgtgatgctcattccggttcaggcattgtctactactaccaattcattggtcagcaatctgattggtgcgggggggataacccatgtcatgcgtttgatttggcgtatagcccagatgtcgtttctcattatggtggtctgtgtggcggtggtggtgctttttcctcatgccatgctttcggtttacaccaacgaaccggcgttgctggtagagtctgtgccttcgttgtatgtcattgccggagcgatgattattgcatcagtggcgaatatttatttcaatgccatttcgggaactggaaatacgcaggctgctctgatacttgaaatggggactttggtattctacgccctttacattctatggataggcatggtggtgaaagcaccggtttctgtttgtttttctatagaggtggtgtactatagtttgttactgcttagcagcattatttatttgaaaaaagcaaaatggcagaataaaaagatataaggttcataagttttttgtatttttgcaccctgttgttattctgaaggttagtaaagaaggacaggcaatcataattcgtaatttataattaaagatatatgttcgataatttaagtgagagactggaacggtcttttaagattctgaaaggtgagggaaaaatcaccgagattaatgtagcggaaacattgaaggatgtgcgtaaagctttgttggatgctgacgtgaactataaggtcgccaaaggctttactgatactgtaaaagaaaaagctttggggcagaatgtgcttacggctgtgaagcccagccagttgatggtaaagattgtacatgatgaactgactgcattgatgggcggtgagactgccgaattggtgttggaaggtcgtccggcggttatcctgatgtcaggtctgcaaggttccggtaagactactttctccggtaaactggcccgtatgctgaaaaccaagaagaaccgtaagccgctgttggtggcttgtgacgtttatcgtcccgctgctatcgaacagttaagagtattgggagaacaaatcgaggttcctgtatatagtgaattggacagcaagaatccggtgcagattgcattgaacgctattcatgaagcaaaagcgaaaggttatgatttggttattgtcgatacagccggtcgtctggctatcgacgaacagatgatgaatgagattgaggcgattaagaaagcggtcaatccggatgaaacattgttcgttgtcgattcaatgaccggtcaggatgcggtgaacacagcccgtgaatttaatgaacgtctggactttaacggtgttgtgctgaccaagttggatggtgatacccgtggcggtgccgctctttctattcgtaccgttgtgaataagcctatcaagtttgtgggtaccggcgaaaagttggatgctatcgaccagttccatcctgcacgtatggcagaccgtattctcggtatgggtgatatcgtgtctttggtagaacgtgcgcaggagcaatatgacgaggaagaggcaaagcgtcttcagaaaaagattgccaaaaaccagttcgacttcaatgactttttgagccagattcatcagataaagaagatgggtaacctgaaagagttggcttccatgattccgggtgtgggtaaagcgattaaagacattgatatcgatgataatgcattcaagagtattgaggcgattatttattccatgactccgcaggaacgtacaaatcccgaaatcctgaacggaacacgtcgtacgcgtatagccaaaggcagtggaaccagcattcaggaggtaaaccgtctgctgaagcagtttgaccagacccgcaagatgatgaagatggtgaccggtagcaagatgggtaagatgatgccgaaacttaaaaagtaaggtttaaataaacaggtagggagaaagtgcggaactttctcctttttttattatgcaacgtggctgatttatgctacatttgttgctcaatggattatttataaataaatagtatgcaactaattgatggaaaagctatttcggaactggtgaagcaggagattgctgcggaagttgccggaatcgtggctaaaggtggcaagcgtccccatttagctgcaatcctcgttggacacgacgggggaagtgagacatacgtggcggctaaagtaaaggcctgtgaagtatgtggtttcaaatccagtctgatccgttatgaagcagatgtgacggaagaagaattactggcaaaggtcagagaactgaatgaggatgctgacgtggatggttttatcgtacaacttcccttaccgaagcatatttccgagcagaaagtgattgaaaccattgactatcgtaaagatgtggatggtttccatcctatcaatgtaggacgtatgtccattggccttccttgctatgtatccgctacgcctaatggtattctggaattgctgaaacgttaccatattgaaacacagggaaagaagtgtgtagtattgggccgtagcaatattgtgggtaagcctatggcgagcctgatgatgcagaaagcttatccgggtgatgccactgtaactgtttgtcacagccgcagcaaggatttggtaaaagaatgtcaggaagctgacattatcattgctgcactgggtcagccgaattttgtgaaggctgagatggtgaaagaaggtgcggtggttattgacgtgggtactacccgtgtgccggatgccacaaagaaatccggattcaaactgaccggagatgtgaaatttgatgaagtggctcccaaatgttcttatatcactcccgttccgggtggtgtgggacctatgactattgtatctttaatgaagaatacgttgctggctggaaaaaaggccatttacaaataagtgccacatgctttgcgaagcttgatggataaaaaaagaatgtgtcaaaagtttggtaatgcttacaggataagctgacctgcttttgacacacttgttttcatgaacaaaagttatgcctgcttttcggacttacctgtaaaatcataaggaaggattttcgctcttaaaagattattttgttcttcggagtaatcatactttcgggagtgtccttgatgtataggtctttctcgctgggaagttcgggacatttatgccctcatgccctcactgcatgtataataggtttattataaaagatttagatggtgagggtaaaaaatattgctctcacttatgctcttatgccctcactgtattgtgaagctgaattttgcataaaatgcttgaatgcagttatatatatactttttataggatattccgttttgatgtaaagtaggctatttttaggttttttttgtaagaagtgcgcatggaggatttgtacctttatggaatatggcggattccggctgtggtaaaaaagatcaggtcatttttaaaaaagatgacgagctttttttaaaaggccgccgtcttttttaaaaacgtcttggtcttttttttaaatgtccttgtcttttggactggcggttggcatgcttgctgacgtggtttctgttggggtcattgtcatcaataaggcatgtgtgtgatatataaagatttgttgcaaacgcttgtagaccctctttctaattttttatttgtattattcgcttgaaaaaaacgatggtactgctgtttcagaacgggtgcaggatagtgaagcctgttggcacagttcggggttgctcctacggaattcaagcgtatgaaaactgtaaattagtgtagaactttgttctttacgaattttttcctatcttgtaccctttaatgttagaatagatgaaacagatcttcattctttttttgctatggtttggtttgtcgctatcggcgcaagatcggatctctttgttgtttgtcggtgatttgatgcaacatcaggctcaaattgatgcagccaggcaaggagacgggtataattataatgattgcttccgtcatgtgaagaaagaaataagtgaggcggatatggctatagggaacttagaggtgacattgggaggaaagccttatagagggtatccggcgttcagtgctccggacgaatatcttcatgctataaaggaagccggatttgatgtattgctgaccgctaacaatcattgtctggataaggggaagttggggttggaacgtactattctgatgttggattctttgaaaatacatcatgctggaacctataggaacccggaagaacgtcataagaactacccgttattgattgagaagaatggttttagaattgtattgttgaactatacttatggaacgaatggcttgaagactgatgctccgaatgtggtgaattatattaatcgggaacaaataaaaaaagatattcttgatgcacgcagaaaacttcctgatgttattatagcctgtatgcattggggagtggaatattgttcgttccctgaacgatcggagtgtgaattggctaactggttgattgaacaaggagttgatcatgtaataggttcgcatccgcatgtactccagcctatggaaattgtaaaagacccccggactcctgcccggcatgtcattgtttattcattaggtaattttatctcaaatatgtcgaaagaaaaaacggatggaggagctatggtaagattgaagttgcaacggatttttcgaataacccgtttagcggattgtgaatatgcattggtttggacttcaagacctgttttaagtaaaaaaaagaactttgaattatatcctgttacttttattaataaatccattaataatgaggaacttaatgtgatgaaacgtttcttgaaaggaactgaaaatttattaggaaaatcgaatggaggcataaaagagtatttttttgaataatttttcctcaaaaagtttgcagatataaaaaaaagcagtacctttgcatcgctttcgaaaggaaagcctaacatggtgactatagttcagtcggttagagcgtcagattgtggttctgaatgtcgtgggttcgaatcccactagtcaccccttcacctatgaaaggttctgtaaatctaatgatttatagaacctttttcagtttttatgtctattagtgtattatcatgatgataaatttgaaagataatagcgaaaaggataagtatatcttggagttgttccagacatctcctaaggaggcttttcgtttattatttgatgcttatcacatgaaattatgtatatatgcggtgcagctgactgattcttttgagatggctgaagatattgtgcaggatttctttatctatttttgggagaagaaatattatttgaaaataaatcagaatcttcgttattatctttatttgtctgtgcggaatgcggccatcaatgctttgcagaaaaacaacatgttgtctatggaagaactctcaggcattgatatgggtattcctgaagagtctatagatgaagaggagcaagaggaacgaaataagttattattggaaaaactacaaaaattacctcatcaggaattacaagtggtgagagctgtcattatggaaaataagaaatataaagaagctgctgaggaacttcatatttctgtgaataccctaaaaactcatctgacaagagcattgaaacaattaagaaaagaatacaatctgcactcactgttttactaaaattaaatttttcttctttttctgtcacccatttattaatttggactctcttttattaaaagaaagtaatcaatgaacaaagagaatccaaaaaagaacaaaaagtcttttgaatattatatagcgcagcgaaaagaagaatttcgttgtcaatatgatcatgaacgttcatgggaaaacctgcaatataagcttcaaaaaagaaagaatcaccgtctcagtttatattgtgtagcagcctcggcagcttttctttttcttattttaggagtcagtcacatattctctcttcacaataacacacaaaacaaggaggccgtagtggctgctgtggtttcatttccggaaacaggcagccgcaaggctatccttactttagagaatggagaaaaagtggatctgtctgttaaaaagggtacgatttctaatgcaaattctactgtaatcaataataatgccaatcaattattgacttatagaaaagtggaagaggtttcttcaactcctcagattaatacattggctattccaagaggaggggaatatcagttgattttatcggatggaacaaggatatggatgaatgctgaaagtcttttgcgttatccaacttctttcattggagaaaaaagagaagttttcctagaaggggaagctttttttgaagtggcgaaagatgctaagcacccctttatagttcatacaaacagacattcggtggaggtacttggtacaagttttaatatatctgcttatcctgattataaggtatatacgactcttgcagaagggcgtatcaaagtaagtacaactaaagtttcggttgtgttaaatcctgaccaacaagcggttattgaaccgaataatgatgatatagtgacacgtgatgtgcctgcttatctatttacttcctgggcgaaaggaaattatgagtttcgtaatacgtctttgtctgaaattgttgcccaactgtcacggtggtataatgtagatatctattttaaaaatgaatctttgaaagataaaagatttgcaggtatcattttcagggatgaagagttgaattttgctattgaagtgattgagagagtgtctaatgtacattttactcgcgaagaagaaacgatttacattgaagatagtagagaaaagtgagttataacaaataatatatttattaaattaatcaacaaacattatgagtgcaaaactttcgagcaaaaatttttacggcggaaatctcatggttaaatgctttgttgcattggtcatattcttttgttcagtgggaaatctgtttgctcaaactgagacgaaggtaactatcaatgtagataaagtgttgatcagaacagcgttggaacggttacaaaaagaaacaaaggtccatttcgtttatgatgaagaaaacatagatcaggataaaagagtgagtttgtcttatactcaggctcctcttaaaatagttctagaagatttttgtaaacaaacatcgttacgttatgaagtgaaaagaaacttgatcctgattttgccgggaaaggctgacaggaatgtaaatcgtcagtcttttttaatgaagggtgtcgttacggatgaggatggagaaagtataattggggctacagttatgattggtggaactagtaaaggtactgttaccgatataaatgggcaatatacattggaagtccagtctggggatttagtttcatttacttttgtggggatgactgataaagttataaaagcacaggtaaataaaaagatggttaatgttcagcttgagagtaatgcaactgctttagcagatgttgtgattactggatatcagaccttatcaaaagaacgcgcaacaggttcatttgataaagtagattccagtgtgttatcatcacgtccgacagcagatctttctacggcattacaaggtttggttgctggaatgcaggcgacggaaaaagaggatggaagcattgattttttaattcgtggttcaagttcattatatgctgataaaaagccattgcttgtagtggatggttttcctattcagggggattttagtagtataaatccgaatgatgtggaaagtgttacagttttgaaagatgcggctgctgcatcaatttggggagctcgttccgctaatggggttattgttgttacgaccaaaaaaggtaaaaaggataaagttcaagttgatgtacaggcatttgttcgtataggtactaatcctgatcttgaatatattatgaatcaggcagatagccgtacaatggttgattatgaaatgagagcgtttgagaataactggaagatagcagcttgggaatatgctccaactttttcaaaaatacagaattctctaactttggcataagagttatattatgctaataaatatcaagggctttctaaagaagaaatggagcagggattagagcgtttacgtaatactagtaatcgtcaacaattgaaagattatttaatgcaaacacagttattgcaacaatataatgtcagtatatctggaggaactgaacgtatgtcaaattatatgtctttaatgtatgagaaaaatgatgaaagtactattaaacgtggatatgagaagttcatgattaactataataattcatataaggttacaaaatggttgactgctaatttgataacaaccttgcaacgtaaggatcaagaaacgtctggcgtgactattggtgaattcagtaatttgtcaccttatgaaatgttattgaatgaagatggtagttatgcaactaatttgaatgtatataatcgtgcggaattagaaaaattgcctttagaaaaattaccttatagtgattggtcatacaatatgcttcgtgaagtgcgtgggcgtgaatataagactacaaatacaatgtatcgtgttcagctggggttaaatgctcaaattattaagggactgaattatgatatgcgtgtgcagtatgaatcgacatcttcagaatataaaaattatgatagcgaagatactttttatgcgcgtaatttagtaaactcatatacggaatataataatgaaacacaggaagtaggggtttctcgtattcctaaaggtggggtcttgcgatcaggtaagacggaatattcaaattatgtatttagaaaccaattgaattataacaattcatttgcagaaaaacatgaaatatctgcattagctggtattgaaataagccaatatgataccgaaggtactgttaatccgtatgtgtatggatataataaagagaaaaatacatcatctgttcctccttatgggtatggtagtaatgtagactcattcaagaatttttttggaaatagtgcaacaattgagggtggaaatacaagttatagtcttcgttgtgacagatatgtatcctattatactaatatagggtatgtatatgacggaaaatatggagcttctttcagtgctcgtggtgatggatctaattttgtttcggatgacccgtctttgcgttggtcgcctatgtggtctgttggcgcaaaatggaatataggtaaagaagagtttataaaagatatagattggattaactatttaaatttacgtgctacttatggaataaatggtaatgcggaaaaaagtacctcgccgttgacattggtttctgttggaagttcggttaattctactacaggtactattactggaaatatctctagctttggtaatccatctttgcgttgggagaaaacttatactacaaatataggtgttgattttgacttgtttagaagtaaattatccggtaagttggatttttataatcggaaaagtaaggatgttatcggacaggttactattccgtctgtatatggtactagtactcagaaatttaataatgctgaaatattaaatcgaggtgttgaattagagttgacaggaaacttccatataccatcggtagatttggggattcgttccactgtgacttatgcttataactacaataagattttaaagctttattatccggctctttattgttatgaattagtagaagcagatactcatgtcgaaggaagaccagtcggtagtttgtattcatatgatttttggggaacggaaaatggaataccttatgttattggggctaatggagataaaatatccatgaatgatgtttctgtacataatcgttctttgggacttgatatcttgcattatagtggtactactattcctccccacacatttggatggtctaatcagtttacttggaataatttcagtttatatgtttatttaacaggtaattttggtggtatctttcgagcgcctactgccggaagtattccttctgtaggtagcggaaaaacttttgtcagtagttctattaaggattttgctgatagtgatggtactctatatcctacttggcctcttaaagatgaatctaatttttatttatgggatcgttatactccgaatttagaatattttgttcaagatgcttcttttattcgtttgaaagaaatcaatttagaatataatttgtctaaaaaacttgctggaaaattacatcttaggggggcgaaactttttgttcaagcacgtaatttaggattgatttattgtgctaatgattatgggtatgatcctgaatggctacctggaagtaataaaccatctgcaacaattgcctttggcgctaatattaatttttaatttaaagattatgaaacaaataatatatgtttttttgttgactgtattgtcttcgtgtgatagttatctgtctaaagtgccttcgccttctactagtgctcctattaataacgtggaacaactggttgcaatttatgataatgcaacagcatttattaatgaaaccaatccctttgcttgttattccaatgatgatgccgacttgacagccgaattatataaagctgatcctagtgcatttgctatatcaagtacggttttttataatatattgcatacagcagggattgcttcacaggcttcggatggtttatggaatggagagtattcaaatatttttaaagctaataccataattaacaatgtggataaagttactggagatgaaagcgagaaaataaaattaaaatgtaatgcccattttttacgtgcttattcgtatttcgtattagctcaatattattgcttgccttattgtgaagccaataaaaatgctttgggacttcccaaacgtttgaatacggattttgaggagtcaatagccagggtgtcattggacgaaatttatcaattgatattagatgatttggaaattgcagccgtgaccccagataagagtgtaaatcctaattttccatggcgtatttgtcaggcaacagtaaatgcattactttcacgtgtatacttgacaatggggaattataaggaggcacaagctactgcggaaaaggctttggaaggagctcctgaactattggattttaatgaattgggttatgctcctgttgaatcttatccagaaatggagggtcttccggcacaggatgtatataattgtgaaactcataaatggacaacgattaagtatttatattggaaggaatttcttttcccacgttttacttatgcgcgtagtcaatggattattccatctgatgatttagtgagtctatatgatcagcagaatgaccgccgttttaagttgttttttgtggaacatggaaaccgtcgtatgggagttccgtatgaagcatatcgttataatcaattctatgatggacgttatataatatctggcttgactactgctgaaatgttattaaataaagcagaggcacaaattcgccaaggaatgtggcaagagggtttaaagactttggacgtgcttcgtgaaaagcgttatgaggccggtacctacatttctcttagcgcaggtaaccaaagtgaagctttatctattgtattggctgaaagacgtcgtgaaatgccattttctatgcgtatacctgatatcaaacgttatggtgtaaatgaaatattggaagatgatgtgacagtagtaaagaatttttttgaaatatcaatgtctgaggtttttatagataagcctaaaacttatacgattccttccaatagtttgttgtgggcgatgccaataaatgatgttgaaatagggtcaagcaatggtgctattcaacaaaatagatatgaatgaacaaccttaaatagtgcaaatcttcaatgattttttgagatgctacgtttggggtatatgtagtatgtttttgacaaaatgatatgttattaattacattataataattggcgatatgagaaaaaatattttttttatagtattcattattttatgtgcagtttcgtgtacagaaaaaaaatcaaattttattaatacggttcatttgaaaggccagttgtttgatatgggtagccagaatgtgcgtatgagatttgacggagcagcatctatgctaggtgacagccgggatattttgttgaaaacggatgctgccggttattttgatactacttttgtacttaaagagccgacatattatactatcagccgcaacacattgtatcttactccaggagatgacatgactatcaaagtaactcagacaaatacagaagcggaattctcgggaatcggagccgaagccaataattacatgaagttccgtctttttccgaaaggtggttcttatctggaagccggtggtaacttgcgtggagattttgtgtccactaaagcgttggttgacagcttggccgctatacgtatgcatacattggatacgttgagtaatgtgtctgatgcatttaaaaagctggaaacagcacggatcaaagcggatattatcaatagttatatctgttatgcaagttattcaaggatgtttgccgaagtgaagaatgaagaagagatgcgggctaaatggaatgagtttaatgtttcattaactcaggatgtaactccgctatataaggagattgtgaatgaagatatgctgaatgtagctgtggtgcgcgatgttttgtcttatcaggaagattctacattggcttctctttggtttaaggatatttccattcctgcgcgtactacggaattatatgcttgtgctaaaatagtcgataatctgagaaatgaagcttcagaacagactgtgaacgaggcgaaggcatttttgcaaacagtgaagaatgctgattttgcaacagaaattgaaggaaagattgttcaagcttccaagttgcttcccggacaacctgccattgattttgaaatgttggatgtggagggtaatgtgaagcatcttgcagattttaagggtaaggtgatttatattgatttatgggcgacctggtgtggcccttgcattcaggaatctccggcatttgaggctttaggtaagaaatatgtgggtaaggatatcgtttttcttccggtttctacagatactacaacgaaaccttggttaaggtatttggatggacataagaaagaattgactcaatatcattccaatgatgttgctttaaaagaaagttgggctatcatgtatattcctcgttttattttgattgacaaggatttcaatattgtgaatgcatacgctccacgtccgtcaagtgaagagattggtactttgattgattctgttcttaataaatagtaaatttatgatttataaaaaatatctattattaggcgtttctttatgcatgttaaatgcttgcaatgagtctaagtctgtgtctttagagggtagtcttgatggaatccaggctgattctatctatttatatcaagtagacaatgagcattatggtagtgtgaaactgattaaatctattgctgttaccgatggtaggtttgcttatcccactgattctatacaagccggtctttattgtttctctttgcagaatatggagcgtggagagtatttacagcaatacgctaatttgtttttggaacccaaatccatgcagcttaccttgggtaaggataagtatgatcaactgagtttacatgctacagggtctgcattgcaggagcaatacgaagccttgcaagaagcgaaatatgtagcaggtaatcgtatggttctcgattctttggatcatatgttctatgaagctcgtgaaaaaggggatcgtgaggaaatggagcgtatccgggaggtttccagtccttattatgagagtgcctcggaacagacccgtaaactgataaatggggaaattgctaaaaataaaggctcatacttcggtttgtatctttattatacttatcgcttccaaaatcatacttttaatacagttgaggagattgatgaggcacgtaacttcataggcagttttgatgaggcgtccaggcgaagtggtatatatgtaaaaatgcaagaaggtttggataaatttgctaggtgtgctaccggtagcgttgctcctgctataacaggaattgatttgaaagggaattctgtcagtttgaacgatttcaagggtaaatatgttctagtcgatttctggtttgccggttgtagttggtgtcgtaaggaaactccttatctgttgaagacgtacaatgctttcaaagataaaggatttactatttatggtgtgtctacagaccgtcgtgaggaagattggaaaaaggctattgaagaagacaagagctattggaatcaggttctgttgcagaaagacgacgtgaaggatgtgttggaatcatactgtattgtcggtttcccacatataattttagtagatccggaaggtaaaattgtagcgaaggagttgcgtggagatgatctttataataccgtcgaaaagtttgtaaacggagcaaaataaagaaatgtgttttttaactcataaagcagtaggctgggaatgtccggtctactgttttttcttttatggaatatggtttttttttgaaggaatgatatggttttattataggtagtgatgttctgtattgtatttattttttaaataaatctaatgtgtgacctgtatttctttaatgttttccttttgaagaacatattgtctgtcggataagttaaaagtttacctttgcaatataatcagaggatgagatattaatctataataaatattataaataaaacgcataggtattgtaagcgtacaatactttttggtggtctcgttggatgcttgtgttcagatttaaggcgaggtcaccttattctcgtagagaatttagattttaatttgaatgatacttgctcgcgatgagtaggtatcatttgttttttagtctattctgtatggaaatggcttgtaagattatacatagaagatagaataattagatcactctgccgttgaaatggaggatttgagcggattattttaattattggaagaattgttctatcctttaaagcatattgcttctatctttgccatactgagaaaaacattaaattacactattatgaagaattttcttatcttatctctgttgttagcctttttgactacggaagtatgtgcgcagtggaaaccggctggtgacaagatcaaaacacagtgggcaaataaaataaatacctctgccgtattgcctgaatatccacgtcctataatggaacgtaatgaatggaagaacttgaatggtttgtgggagtatgctatcaccgatttgggaggaaatgttccggcgcattttgacgggcagattttggtaccttttgcagtggaatcttctttatcaggtgtgggacaaagagtcggtgcaaaaaaggaattatggtattcccgttcatttgaagtgcctgttgcttggaaaaataaaaatgtattacttcatttcggtgctgtggactggaaagcagatatttgggtaaatgatgtgaaggttggtagtcatactggtggttttactccgttttcttttgatatcactgcagcgttgtctggtaagggaaataataaattagtagtaaaagtttgggaccctacggatgaagggtatcagcctagaggtaaacaggtgaataatccggagggtatttggtatactcctgtgactggcatttggcagactgtttggctggaaccggttactgccagacatattgaagaacttcgaatcacaccggatattgaccaacacttactgactgtaaaagcccatttgaatatgagggcaccttccgatctgattgaagtaaacgtatatgacggcaatcagttggttgccactgggaaaagtattaatgatgaggctgtggtcatacctatgccggaagatgctaaattatggagtcctgattttccctttttgtatactttaaaggttatgttgaaaagcgataataaaatattggatcaggtgaacagttatgcagctatgcgcaaatactctacgaaacgtgatgctaatggaattgtacgtttagaactgaataaccaacctttgttccagttcggaccattggatcagggatggtggcctgatggattgtataccgctcctactgatgaggctttagtatatgatatacaaaagactaaatacttaggattcaatatgatacgtaaacatattaaagtggaaccggcccgttggtatactcattgtgatcaattgggaattattgtgtggcaggatatgcctagcggtgatcgtaatccggagtggcagaaccgcaaatattttgaaggtacggaaaaaaagcgttcggcggtttctgaggcttgttaccgtaaagaatggaaagaaattatggattgcttgtattcttatccatgtatcggaacatgggttccgttcaatgaggcatgggggcaattcaagactccggaaattgcagaatggactaaagaatatgatccgacccgtctggtaaatcctgcaagtggaggtaaccattatacttgtggcgatatgcttgacttgcataattatcctgctcccgaaatgtatctgtatgatgcccagcgagctaatgttttgggagagtatggtggtatcggttgggtagtgaaaaatcatatttgggaaccggatcgtaactggggatatatacagtttaattcttccaaagaagtaactgatgagtatataaaatatacagatatgctttatgacctgataatcaggggattctcggcggctgtttatactcagactacggatgtggaggtggaagtgaacggactgatgacttatgatcgtaaggtgattaaagtagatgaaaaacgagtgagagaagccaacgcacgtatctgtaaatcattaaagtaaggaatatgaataagctgttcttttgggtatgtgcagtccttatgactgcatgtgcttcttataaaaatgatgaggtcttgactgaatccggtttaagtaacagtcgttttcaaacggagataaatggtgagaaaactgatctgtttgtattgaagaataaaaataagatggaagtttgtatcaccaactatggcggtcgtattgtttctgttatggttcctgataaagatggaataatgagggatgtagtattgggttttgattccatacaggactatatcaaatatccgtcggattttggagcaagtatagggcgttatgccaaccgtataaatcagggacgtttttcattggatgagatagtataccaattgcctcgaaacaattacggacattgtttgcatggaggtcctcaaggatttcaatatcgtatttatagaggtattcaagtgagtgacagagaggtgaaactgacttacttgtctaaaaatggtgaagagggttttcctggaaatttgaattgtactattataatgaaattgacggacgataatgctattgatattcagtatgaagcagaaacggataaaccgactgttgtaaacatgactaatcattcttattttaatttagatggagatccgtcaaaagataattctgattatttattgactttgaacgcggattattatactcctgttgacagtacttttatgacgactggagaaattgttccggttgagggtactcctatggatttcagacttcctgctgtcattggaactcgtattaatcaagattttgaacaattaagatatgggaatggcattgatcataattgggtattgaatactaagggggatattcatcaagtttgtgccacattggagtcacctgttacggggattgtactcaatgtttatactgacgagccgggtattcaggtttattgtggtaattttctagatgggacattgacgggtaaaaaaaatacaatatataattttcgggcctctgtgtgcttggaaacgcaaaaatatcccgatacacctaataaggcagactggcctacggcagtagtgagaccaggagaaaaatatcaaagtcattgtatttacaagttttcggtacataaataatgtatgttaaggtagaaggaattgtggaatataacatttgggataaataagattcagagaggaagagtcctgaaagaagcggtgagagtaaacactggttcttttgggactttttccggataattattgatatggagaatttaatctttaattttgtactctctaaactaaattgatatactatgaaaagaatattcataataggacttctttttttatatgcatttactctttactctcaaagtaatatccgatattatttcaaaacattggatattcaagacggactctcgcaaaacacggtgaacgctattttgcaagataaacaaggtttcatgtggtttggaacaaaagatggtttgaatcgttttgatggcctgagttttcgtattttcaaaaaagagaattctgctttaggaaataattttatcactgcacttcatgaggataaagaaggaaatatttgggttggaacagatgcaggcgtttatgtgtataatcctttattagaagactttacagtatttgatagagttagtgacacaggtgatatgattagtcgtgctgtgactcgtattgaaagtgatgaagatagtgatatatggatttccgtggattatcaaggattgtttcattttgatcgtgtgcaagatcggttaattaattgtctgcatagagataagcgtaagaaccaattggccaatgttacgcgtttttggtttgaggaaaaactatgttgggtcagtttatatgacgacaacctatattatacaaaagataattttaagacattgtttccctttcaggattctgaaggaaaagagccttttaaagatgatatcattaatacttggattatgggtccccataattgttggtatatcggttcttctaatggtttgactgaaattaatctgacaacagggcgggtaaggcgtttgttgaattattatgtgcgtgatttaggctttaaatcggataaggaattatgggtaggtacggagtcggggctatatatttatgatttggaaaaaggtgaaatagctcatctcactgtttcaaacgggaatgattcttatgctttagccgataatgctatttattctatatgccgtgataatgagggaggaatgtggatcggatcttattttggcggggtcaattactatccgcgtcaatggacttattttgaaaaattctaccctcgtgatgatattaaaaattttgggcgtagggtacgtgagttctgtgaaagtaatgatggtactgtttggattggtactgaagataagggattatttcatttttatccggaaagtggaaagattgaaaaattctcacatcctgctatttatcaaaatgttcatggtttatgtttggacggtgatgatttgtgggtaggcactttttccggaggtttaagccgtattgatttgcttacgaagcaagtaagacactatcaaaaaggtataagcccaaattctttggatgccaataatgtattctctatttgtaaaactacatctggtgacttatggattggcactacatctggattgctgcgatataatcgtgatacagatgactttactaggatgccggaactagctaatatgtttgtttataaaatattggaggattttagtgggaatttgtggctggcaacttattctaacggtgtttttcgttatgatgtgaataagaaagaatggaagaattttatttttcacaagaacgattccacttcattaccttatgataaagtaatcagtatttgtgaagatagtcgtaagcggttatggtttatgacacaaggggcgggtttttgccgttttaatccggaaaatgaaagctttactcgttttgatatgtcgaaaggttttcctagtaatatcatttatcggatggtagaggataatcgggggaatttatggttgacaactaataatggtttggtttgtttcaatccggaaacagatgataaacgagtttatactacagcaaacggattgctaagtaaccagtttaattatcagtctgggtataaagataagatgggacgtatctatttaggtagtataaatggttttatcacttttgatccatctacttttgtagaaaatacttttgttccaccagttgtcattacagatttcttcttattcaataaacgaatgcagatcggcagtaaggattctccattgaaagaaagcatcgtcttttctgatgaggtcgagttagaatctgatcaaaattctttttcattgcatgcggcggcattaggttatcaggcaccggaaatgaatcaattggtttataaaatggaaggatttgataaagagtggtataatgtagggcggaattcggtaatcaattattccaatttaccatatggaacttatattttccatttaagaggatcgaatagtgacggaaaatggaatgaaaaagagcgtatattgaagattcatattttacctccgttttatttatcagggtgggcctattttatttatttgctattaggaattctgtctgtggtaggtatcatttattatttccggaaaaggaatgagcagaaacaccaacaggccatggagaaattcgaacgggaaaaggaacgcgaactctatactgcaaaaatagatttctttacgaatgtggcgcatgagattcgtactcctttgacattaatcaaaagtccgcttgaaaatgtgcttgtttctccgaatgtatctgcagatatccgtgatgatttggaaataatgaatctgaatactacccgtttactggatttggttaatcagttacttgatttcagaaagactgaaacacgtgggtttcaactgaattttgtagagtgtaatatttcggatatattacagcagatttatatgcggtttactccattggcacggcaaaagaaattggaatttgttattgaatgttcggaatctatctatgcgtcgatagatcgtgaggcgttgactaagataattagtaatctgtttactaatgccattaaatattctgaaacttatattcatgtccggttgtggatggaggatacttgttggttcttgtctgtctgtaacgatggcaatgtaattcctatggaaatgcgtgaagagatttttaagcctttcatacagtataaggacggattttcccgtaaggtttcgggtacgggaattggtttggcattggcaagatctttagctgagttgcatgaagggaacttaattatggatgattcacaaaagcagaattgttttattctttcattgccagtaaagcatgaacatactattgccatttcgaagagtgagattaagttgaaagaggatccgaaagaagaggatccgggacaattgcaacagaagccgcgttacactgtattgattgtggaggataatgttgaaatgttggcttttgttgtcagacaattgtcacctgtttatcaaatattgactgcaactaacggagtggaggccttaaaggtgttggaggggcatacagtgaacttaatagtatcggatataatgatgcccgaaatggatgggttggaattatgtgaccgtataaaatcagacttggattacagtcatattcctattgtactgttgacggctaagaccactttacaatcaaaaatagatggtttgaaatctggagcggatgcttatattgaaaagccgttttctgtggagtatttgaaagtgtctgttgccaatttattaagtaatcatgaaaagctgcatgcggcttttgcacattcaccgtttatacagaccaattctatggctatgacgaaagcggatgaaacttttttgaaaaccttgaatgaagtgattgttgccaatatgcaaaatccggacttctgtctggacgatatggcgagtttgctcaatatgagccgttccagtttgaaccgcaaaataaaaggagtgttggacatgacccctaatgactatatccgtttagagagattgaaaaaagctgctcaattattaagggaaggagaatgtaaggtaaatgaagtatgttatatggttggcttcaatactccttcttattttactaaatgttttcagaagcaatttggtattttaccaaaagattttgtgaaatgatttttttcggcgcatgaaatagaataatagaactaatcgccctcaggaactattctgagggcgatttttgaatgtattattctattaattggttgaatagttctagcacattcggggagtttggaatacatttgcatcacaaaaagttgagaatatgattcatgtaatactgtgaaaaaagaaatgcctatgacataacaagaatgtgacctttaaattctatctgttgtatgtatatttatgaacatacttgtgattaattaaaaagcggaactgaaatctccgcacaattttacaaatctaattctataaaaaatgattaaaaaattattagtcttctttctgactatttttacgatgactgcttatgcgcagaacgtaacaatgaccggaaccgtagtagacacagacaacttgcctttaattggtgtgaatgtggttattaagggtacttctaccggtactactactgatttggatggtaagtttactcttactggagaaaatggacaaacattggttttctcatatatagggatgaccctccaagagattgtttacaagggaaaacctttgcacgtgataatgaaggatgattccaaggctttggaagaggtggttataattggttatcagactgtgaagaaatctgatctgacgggtgcagtagcagtagttgataccaaagagatgaaaaaaagctcagctggaacacttgtcagtcagatgcaggggcttgctacaggtgtaaacgttcgtagtagtggtagagcaggtgaggatgcttctattcaaattcgtggtgtgggttcattaagtaataatgctccgttgtgggtggtcgatgggatgataactgatccgggagttgactttaatccggctgacgttgaatctattcagatcttgaaagatgcttccgctgccgctatatatggttctcgtgctgctaatggggtgattattgttactactaagaaaggggtgagtggtcctatgaaggtgaatgtgagtgtgaaagaaacattggagtggagtccgaagtttgatttgatgaatgcggcagagtacattaaatataatgatatagcttataaagaagcgataaaagatggtatagcctccataacaacaactcagaagcattccgaatatgataccaattggcaggatgaggtattgaagacagctttggtacaggattataatgtatctttatccggtggtggagattcgggtagttattttgtttcagctggttactataataatgatggtgtatcttatggaaatacgtttgatcgttatagtttccgtgttaacacacaggggaaaaaaggttggttttcattcggtgagaacttggcctactcattaactaatacagatccgaaccagacaaatacttataatgactttttacgtatgatgcctactattccggtttatgatgagaataatccaggtggttatggatatggagatgcggctaaatataatactttcggtgtaaatcccattgcacgtgaaaatttggaaaaacgccatatgagacaaaatcgtctgaatggttcattgtggttggagttcaaacctttcgagtttctttcttataagttcaatgggggcgttgacttgtatttctatgaaaattcatggtttcgtggtgaaggtaattggcaacaaaatcaggaacatcgtgatccggagagccagaaagcacgtgataatacttataatatgctgattgagcacacgttgaattttaacaaggattttggaaaacatcatgtcgatgcagtattaggtactacttaccaacatcatgagtgggaggggttatgggcttcccgtcttaattttcctatgttaggtaatggtgattatctgacagtgttaaatgctggacaaagtaaccaacagaatactaatagtattagtgagaatgccatgatctcttatttgggacgtgttaattatatttatgatgacaaatattatctgacagctactttccgtcgggatggtacttctcgtttagctaaggaaaatcgctggggtaattttccttctgtttctgctgcctggagaatttctaaggaaagtttctttaaggtaccttggattgatgatttgaagatcaggggaaattgggggcgtttgggtaatgcttctatcggtgattgggattatgttggtactattaatcaaagcattgtgacggtatttggtggagctattgtacctggagccactcaagtaaaattagtgaataccaatcttgtttgggaaaccaaagaaaccgtaaatattggttttgacgctagttttctcaattcacgtttgactttcagtgccgagtattatcattcaaagactaaggatgttttgacggaaatgcctattgccatctctaccggtaatcaagaaggggcacctaaagcaaatgcggctagtttgcgcaatcgtggatttgaattgagcttggggtggaaagatcaagtttcagatttcaaatatggtgcattgttgaatattacaactttgagtaataaagtattaagtttaggatatgaaaaaccttttattgattcaggtcaggcaagaacgaggttgaatggtccgttggcagaattttttttgtataaaaccgatgggatttttaaaacacaagaacaaatagataattatgtaactcctgatggcgaacctattatgatttccgggaaacgtccgcaattaggtgatgtgaaatatattgatacggataataatggacagattacggcggatgaccgtcaattttgcggaagtccgtgggcaaagatgcaaatgtcattggtcttgaatgctgaatggaaagactttgatttcagtatgatgtggaatgggcaatttggtaataaaatttataatgtatccaaatggcaaggacgtttgttctcggacaattccaattatcttcgcttcaagaagggagaagaaccttatcaggtaaatcagaattctgatacgccacgtataatttatggtgaccaacgtaattcatgggatgcggatcgtttccttgaaaacggttcttatttcagactgaaaaatatttctatcggatacaatcttaaaaaggaatggttgaagaatttgggtattgacaaacttcgtttatatgctaccggtagtaatctgctcacttttacaggctattccgggcttgatcctgattttataaacactaatatttggaatagtggaacggatagtttttcatatcctaatactcgttctgttatgtttggcttggatttgaccttttaacttataaattagtatactgatatgaagaaaatatatagatttttatttgctggtgtcttggctttgtgtgctaccggatgcagctcaagtttattggatatagaaaatccgaatgaagtaaccaatactactttttggaaatcggcggatgatgcaaaagctggagtaaatgcttgttacagtttcttatataaagaagggacttggatgcgttggttgtcttttcgttacgatctgtcatcagatgaaggatggagttcgtctccttggatagaattaggtgactggacgcgttttctttataataattatgatttctatgagggtaataaggtacattgggagcatttttatgtagggatctttcgttgtaatcaggttttggctaatgtgcctgcgattgaaatggatgaggttcaaaagaaccaacttttagcacaggcttcctttttgcgtgctctgtggtattttcagataaatcttttgtgggagaaagggacattagttcttgaacctcaaaatgctgattacatacctaaggacgcttcagaacaggaaatttgggatcagatagaaaaagaccttacgtttgcaatggagaatttgccggaggcatgggatgcggcagatttaggcagagcgacaaaaggtgctgctaaagctttgttgggcaaggcttatatgcaacaacataaatatgatagggccaaagaacagttgcaatggctgattgatagggaaggctctttgtatggtttgcttgataaccgtgaagacaattttaccgatttgaatgaaaataatcaggagggaatatttgaaattcagtttgatgatcaaaataaggggggcacaggcaatgatgccagtatggcctttggtttccagcgtactcagttttatgcacccggtggcactcatggtacgggttggggcgatggtaaagcgcgtcgttggctagtagatgagttcttgaaagagagaagggttgatggcagaaatgacttgcgtttatacaatagtattctttataaacattttggagatgattttcctgatcagtcaaaaaaatactatgccaatgaagatgcgtcacaatggtttgatgagtggggacaggacacagaggattgttatattcgcaaatacaatacttcttactatcgtgaacgtgaagactatttcgcacgtaataattatcgtattatgcggtatgctgatgttttattgagttatgcggagtgtttggttgaaactggaacttcggcttctgatgcggctgtttatgttgataaggtaagagaacgtgcagggttatccaaactgaaagatagtcggtggaaggattgtttaagttcaaaggaggtctttatcaaacgtcttcagatggaacgtgctttggaactttgtttcgaaggctggcgttgggcggatttgaagcgctggggattgcttgattcacaggctggtattgacgagctgaaagctcgtgacaaggacttcaacaattttgtgattggcaaacacaaacgtatgcctatccctacatcggaagttgaaatcagtaagattgatgatgttcctcaactaactcagaatcctaattattaataaaaaagaaagactgtgtcggagtgttttttctttttataatacttccggcatagtctttatttaactagtatcatttatgcttgtctgcaaaaaaatactgatcttctgtgcttttgcttgttgcggtactttattcgcgcaaaacatacagaatccggtgcttcccggagtagcggatgccggtgtgatgaaatataatggtaagtattatataggtggagtatttaccaatggggatttttatgtttccgacgacttggttcattggggtaaacctgttcatgtcgtgactatggataatggctggagtaaaggaagtggtgccggtaatgagcagattcacgccaatgatatgttttgtttgaatggtgattttcacttatattggtctgtcaattattggggtaaggataagcatgctgttcacattgtacatgctcaaagtaaaaatgtgttggggccctatatagagcctgataaaaaaacttggatggataatcgcattgatcctaaggtttttaaagatgatgacggacaattatatatgtatatggtgcgttttactgatggaaatactatttggggacgtaaaatgaagaatccggcggaatttgccggagaaccagtgtgcttgtttgcatcattgccggatacatgggagaccatggataacagagtggcagagggaccttgggtgatgaaatacagagaccgatactatttgatgtataatgccaatcatacctctactgagtgggggaattatcaattgggggttgcggaggcagactcacctttaagttttcaaaatgggaataaatatagctatccggtagtaaattctaatcaaattctactggaagagaattatgtggatcttttacgatatggcatcacttatgagccattgtttgattatacagaaaataatcctggagtcggttggatgcttccggtatatcaggcttccgattggaagaaaggagaatgtggattctcatctaaagagataaaaggatctaccactcgtcatttaggtacttggtggacatctccttcattgtggttacgtaaatctttttttgttggcaaacaggtgggaaatttagcactcagggttgctcatgacggagatacaaaaatatatttgaatggaacattgatttacgaaaaacagggacgggattattgtatggtaaaccttgatgaaaagcaacgagagcttctgaaaaaaggagagaacttgcttgctgtagaaacaaataaagggcgtgcccaattttttgatgtttctttgtttgatatgaggagtgaaacagcagatgatattttgatgaccccgggacaacctaatattttaagggggcccaatggatttgaatggtggcttatatatatggctaataaaaataatgagtgtagggggcagtatattaaccgtgttcatttctttaataaaacattatttgttgaaggaataaccggtccttgtacagatggctatcatccggaaccttctttgcccactttttcaatgaaaggggaaacaccttcttttggagtgctgcaacaagtgaaaccttctacaacttatatgtttgaaacagcagtcaaaacagatggagatgctggtatcattgcgtggtggaaagatgtggataataatgcttatatcggtttcgatacaaagaaccacaattggtatttgcgtaccattattaatggtaaagaaaaggaggaatatttcactttgcctaaagattttcgttggggtgtttatcatcatttacgtattgaacgtaatcaggattgtttaaaagtatggttggatgaaataccatctcctcaaaaacatctgtttacaaagattattcctgtgacggaacccggtgttcccggagtgtttgatcggactaaaaaagctttgttcgaaggggtgacttatactatcggatttgatgatgaccggatacagttaaaagaacattcagaaatattgaaaggtgattttcttgatcattatgaatttagttttcaactttcaggtttgtccgattgtaagatgtcaggaagctatccggtttatgtggataaagataactatgtaaaagctcaatttaatggtatcacgcgtatgctggaagtggtagttgtaaaacaaggacaacagatacttgataaaaaatatccgttggaacatttacaaatggtttatcctgatgtgaagtatactgattttgtcgaaaaatgttatcgttttatatcgccttcatggataaatgccctttacctgaaccgtcatgaagtagggaataaggcggagtttgtagacgatatgtttagtaaatttacaatagaatatttgaatgagggaaaatggtatccattgaataacagcggggcgacggtggcagagcatctggcttataatcgtttgtcttttactccgataaaaacggaaggtattcgttttattaataaagacgctcaggatttggaacggcatatttataagttgggaattcaagaacaattaaaggaatcttataatttccgtgcggtgagaaggggaaataagctctatctttttgttgacggaagagaattagggagattggatattcattatcctgcttcttgtgtaggattttgttctggaaattattctccggtatataaaggaatattgtattatcatataggaaactgactagtattatgaaaaaaaaaatgatttttatttggttattgatgttggggacattgacttcttgtcagtcatgttcctcagaatataagaatgtgaatgaaataattgtggaagagctggaaatacctgttccactgggtgacccgtttatattgttgcacaatgggacttattatgcttatggtactcactcggatgaaggaatagaggtttatatctcggataatttaaaaacgtggaaatataaagggctggctttgaataagaaggattcatgggcagaccgttggttttgggcaccggaagtatatgaagtgaatggtaaattttatatgtattattcggcagatgagcatatttgtgtagcagtggcagattcccctgtaggaccatttatacaaaataagcaagaacctatgattgttgaggagaaatgtattgataattcttttttcatggatgatgacggtactccttatttgtcatttgtccgttttaatgatgggaataatgtatggatagccgagttggaaaaagatttgataacccttaagaaagaaacgatgcgtccttgtattcatgtttcacaggcttgggaggaagtgtggcctcgagtcaatgaaggttcttatattctcaaacacaatggaatttattatatgacttattctgcgaatagttatgaaagtccattctatggtgtaggttgtgctacagctaccgatataatgggggaatgggctaaatacgacgaaaatccattattgcaaaatcctggtgggttggtaggtgtagggcatagcgccatgttcactgataaagagggaaaacttcgtattgtattccatgcccacaaagataaaagtaatattcatccgcgtgctatgtatattggtacggtaaattttgagaatgtgaatggaacagaccgtatgagaatcagtaaagaatatataactcctaaattactgcaatgagaaaaaatttgatcctgtctatctgcttttgtttggtgtcttgctcatcatcgtctgcgcaagaagaaatacctgatggtgataaaaccagctattactggaatccggtgatagattatagtctgcccgatcctactattatagaaggtggtgatggttattattatttgtatgcaaccgaagatattcgtaatttgccgatccatcgttccaaggatttgattaattgggaatgggtaggtacagcattcacggatcgaacgcgtcctgattttgaaccgggtggaggcttatgggctccggatatcaataagataggtgatacgtatgtactttattattctatgtctaaatggggaggtgagtggacctgtggtatcggttgcgctacggcagacaaactttcggggccatttaaagaccatggtctgatgtttcggagtaacgagattaatgtacagaattctattgaccctttctatatagaagatgccggaaagaaatttttgttttggggcagctttcggggcatttatggcattgaattaagtgaggacggtctttcaataaaacaagggaagaagcctcggcaggtggctggtacagcttatgaaggaacttatattcataaaaaagaaggtttttactatttttttgcttccatagggacttgctgtgaaggattgaatagcacttacactactgtagttgctcgttcagaaaatttgtttggaccttatgttgataagaacgggaggacaatgatggataaccaacatgaagtgttgattcataagaatagttcgtttgtgggaacaggacacaattcggagattgtgactgataaagtgggtaatgattgggtattttatcatgcagtggccacaaagcatcctgaagggcgtgttttgatgatggataaaataagttggaaagacggatggcctgtggtagctacggattctccctcattgaaatcggaaaaacctgtattgtaattaataaatacataaaaatatgaattggaaaaactttgtatgtagtgtggtgtgtctggcaggaatgacttgtgcggaagctgtgaactatacaccggaaaatgtttcggcttccattgctttgaaagtgcctggtaatgatgcgaagcggtatccgctgactttgcagcaattggataatagtaattttgaatatcagtgggtggcggccgataaattacctgtggtgatttatcagaatgttgaagaaaaagacggcaaccagcgtattgtcatttttatgactgcattggatgatgtttatttcaattttggtgagcaggtaatgactggttgtcatcatgatgattgtttgttttatatgcctggattttggtatcgtcgtaacttgcgttctcctcaagaagcgccgtcttttcatacctcggatagctggttggttcgtgaagaccgtttaagtactcccttgactgctatttttgatgaaaagaataggaaaacatattctgttatccggctggataatatggcttcggatgctttgactacccataaggaaggggaagtgatattgtctggtaaaacctctataggttatacaggatttgaaaacctctcgggtatcgcttctttgtcttttgggtttccttacaaggaagctcctaaaacttatattcgtaaattgacattggctccttcggttgaggcctatcaattattacgtaaaggtgagagtctttctctgacttgggaattacatgagtcggaaattgctgatttttcagaatgtgtgcagcatatttgggaatattcttatgatacaaactgtcctcaaattgtaaatacaccttattctcctgagaaaatgaaggaagtgatgagtaatttcttcgtggaaagttttgtcggaaatactcctactcattattattcgggggtggaattgcgtacagctacttgtgaccaaacggatgttgccgaagtgggttttgtgggacgtactttgttgaatgcttttaatgcattggaatatggagaacagcagcgtcgtacggatttggtgacgaatgcttataaaatttttgattcttatttgcagaatggattttcggaaacgggtttctttaatgaagtagtacattataggcgtaattttgtagagtctgttcatagtatccgccgtcagtctgaaggggtatatgccctgcttcattttttgaattacgaaagactgcaaggtcgtaaacatcctgagtgggaaaagcgtataaaaagtatgttggatatgtttctgcgtttacaaaataaggacggtagttttcctcgtaagtttaaagatgacttttctattgtagacaagagtgggggaagtaccccttcggcaactttgccattggttatgggatataaatattttaaggataaacggtatttggcaagtgcaaaacatacggtggagtatttggaaaaggaattgatttcgaagtccgattatttttcttctactttggatgctaattgcgaggataaagaggcatctttgtatgcgtcaactgccgcttactatttggctttagctacaaaaggagctgaacgagcccattatgctgggttggcgaggaaggcagcttattttgcattgtcatggtactatacatgggatgtcccttttgcccccggtcagatgttgggtgatttagggttgaaaactagaggctggggaaatgtttctgtagaaaataaccatattgatgtctttatctttgatttcgctgacgtattgaactggttggcaaaagaatataatgaaaagcgtttttcggatttttctcaggtaatcagtacatcaatgcgtcagttgttaccctatgaagggcatcgatgtggtattgccaaaacaggatattatccggaggttgtccagcatactaactgggactacggtaagaatggtaaaggctattataatgatatttttgctccgggatggacagtggcttcattgtgggaattattttctccgggacgtgccgagaagttcttgaaaaaatagtttgaaaattgataatttattatgatgttaagtgattagcatttcatttaaaacttgattttcttttcttttgtagggaaaggtatgtcctttttcagaaaatcagctttctctttaaggaaggatacctgaagtatattaaaaagccggggattgtctttacagatgttcccggcataattttttaccgtcactggcattattgttctgactttacatctcttattgaataaaacaagtaaaagaaagaatttctctatgttaagataacagtttactttaaattcttatcttattgacagattgatttgaaagacaaacgcttatagaagttttaaaaagtttcgggtaacgatttggagattgtgctaatttcagtattttacagcctcctacttatggaacaaccctcttaggatacaaagatacagatattttttgaataagcaaatatttttattcatagagaaaaaggcttcttcttatggagcatgtttcaacagataagaacaagaatatgatacaaaatatttgcaataaaaatgaaggtgtgtcatatacgcgatgcgccttttttttttcgttgactataaaaatcggctcatttttttaagctgcgatattttgaggatttctttgatttatgtgttcgcaacatctaaatatagctactgtaagctcataaaacagtctaatcagtcaatccataccttctttagccatttttgcacacatcttttttatattgaaggcaatggcaaagaaggcaaagtccatgaagatcttatcctttccaaaatggcggaaacgtttgtagttcatattgtatttcatttgttcgaacacagcttccggttctatgcatctctgtcctctgtgtttcagtccttccttggaacacagcagctctttggctttctgcctgtatcttctgagtctgtgattctgttctatcgtcctgttctcctttgccttaaaatatcggcatcttagcggacagtcttcacatctgacggctctgtatttggcattttcgctgacatatccgaatgctgttttcacatgtccggtccctatcctttgcatcttttgtcccatagggcagatacaaaagtcatgttcttcattgtagtagaagttttccgccttgaacgggtccggtttgaacctcgaccgctgttccacgtggaagtagttgtacttgacgccataacacataatcttgcaaaagtagcctcttaggaggtttatggcaacgaaaaaacagtttgaaaggatgaaatcttcaaaagcaagcttataaattcttcttttgagaacaatacaaatgacttcaatctgaaataaaacaaaaaaagaccatctcaagtttattttgagacagcctcttcatgagtggtggcaccaaattgatttctagaaatccggtatagtggtttgccactgctatagcgtataaattgttttgccgatattttatcggcagacagtttgtatagcctgtggtatatttttttagaactttctgaatgtgaggcgtgcataatcagatttcagaattagtttcttgcctgttgctttttccaccttaagatgattaatagcttgattaagtccgaaaggtttcaattcattcagtgtcgttagtttttcttcatctccccggtggcggaattcactcatggttacctcatctcctttataagagaaacgtccgatatgagtgcctccatttccacctttggcactgatttccaccaaatgtaactggatactataataaatgcggttacattcttctattttcccattagtatattctatagtcattaattgccatctgccatctaatttgccgttgatgggagctttgtcacaactgctgattcccagcataaagagtatgaataataatatttgtttcatatgttgattgggttgacagttaaaatttctatttattgcccgatttgataattccttgtttgcggataaccagcattccaccataattatttccaagtaagctgccgcgatccatagctccggatacagtgaaactccatcctttcagttgttgtggagcataagttacttcaaacaaagagttgaattgtttcttgatctcattcagaggattatcataagtaccccaatggcgggagtaggagagcagcatacgataacttagcgactgacagggggaaccgcagaatcctatgtgatgtgccagtacacgattgctgataaaagtaatctgtccgttcttgttgtaaataggtccgggaagtaaaggattacctattcccattccccaatgctgccatccttgatagaggtagtgattataataattatctttagcactgatttgctcttcaaattccccccaaaaggaatcatacagcataggtccggtttgatcttttgttcctaatccttcgtatacaaaagtatcaatgaagcggtttttgggaaaagttatttccagtccgatgtgtccgtctttccaacgtccgtattggaaaaacatttgggagtggtcgtcgaaataatgttcataatagatctttaccttccatcggttaagataagctgttgcggcaaaattccagctaccgacatggtttccgtagatgtttacttgttcgccttcgggtgtggtatcatctccggccataggaaccaatacacgcataaagtcaacaaaccgggtaggcatatctattacaggctctttttgtcctgcaatatattggtctccgccaaattgggcggacatttgtattcctccttcaaattctaccggaaaatgttctttgtttcctactttggcgaaaagcgatttactgtggtaaagtacatcaatggtatatgggttgcctatggaggtgaaatgctcctgccatttgtcatcagtaaaacgtccataggctatgtgtcctttcaaatgaagccatttatgggtacctggtatggctacataatcaggaacttccaggcgtatttggggaatggggcgggcattatttgattctaccatacctccactgcttaacttggaattctttaattcgggcaagcgttctttgctgccgatactcaggttcaaccatcggtagctgaggtctgcataggcttgttggatgatgaaggaggaggtgaaattgtaggcggttgccaaatccagtcctgcactgaagccgaaatgttggtttaatggcattgtatgtgcaatccctgcccgtaaataaccattttcggtattggcagaagataaaccttgcctgttggcagtaagccacatcggcgcgtaggttcctttacccgatgttcctcccatctcaacggtatattctgttttgacagggagttgggcattggtgtgctgcgtaatagatattaacagaaattgtaataagaatagttgtattttcttcatttagtttatgtatttgggtgtagatgtgttaataacacttctacaaaatatcatggcatatgaagtgattatactctatcatcttcatatgccatttttattgtcatttttctgtatattctactatacttttatcgggcaagacataaaatctcggaagaagtctgctgacctcttctgattcttttagtaaacttatatcatgctgctttcaccgttttgttcctgatcctgtcaagcatcagtatggcgttttccgtatgtattccgaagaaaatccgcaggatttcctgcttcctgttccttgcctttattcttgcgagcgagtaatgttgcttttgagagttcacttctaggcacctggctcatcttttgccgctcttcccttgcgcacaaaggatgtggatattccatatcttgtacagaactttctgttggcattattggcatatatggaatcggcagccagacatcttaccttaagccttataccctcattgaacgccttgaacgagagatgttcgatgaacgatatatcgtctatctgtatattattgacctttgcaccgaactcgacggacttgattcccttgcctctgacgatgggacgtacataatgacggttaatattgacgatacggtcactgacttttcgcccttcaaacatttccttttcctgtacaagaaccttcctgatgatggaaagatgtttatgataatcttgggtatatcggagtgaagttccgtactctctatgaatttcacccctttgattgaggagtttttcaaggagtctgatcacgcttgagcattcttgtccttgaagctctcctctttcttttcttgcagtaggacagataggattccgccacattcctgtatttgttacgcggacgccttatgccaatccctgcaatatatgcctgtagagccattcaatgctttccaaaaggagtttcatgtccgtaagaaaatgcatatggttctcataacatatggcatcggtcatgcagacgtgaaggttatcaagataaggtttccagtgtgaagctaggatctcttggaagaaatcaatgtcaaggtgggatgctgtcggatgcgacgaggatgccgaacaaatccgtggatccccgccttttcatgagaaagggagtggctgtctgcctaatttttcgcatctgggtaatgtgcccacagttccttgtaggtctcggcaagtgcgcggtgagcttcgtcaatcactatcaggtctgacctgtcattttccacatcctcccaatggtgtgacagccattgggaggaacagaccaatccctcctctttccgtatgccgtaccgcaccaccgtatcttctatctgttctaccagttcacgacggtgggtggcaatccacacactttgcctttgccgttcttgcaaatgctcatgaatgaccgacgcgagcgaatggagtttgcctatacctgttggcatttgtaccatcatgtttttattcaacctccacgtatcagacacgcatagcctgatgctctgttggtaagggcagagaatgttggaataagacttcattggatattgtcatcagcgtcatcctttgaatccactggaacattccacggcacatccaagaaacggtgtcttaaaggaaggttactttcattgtccacgcagaaattttctatatcataaagtgagttcgtctcaaattccatcaagtcctttatccgcttgtcaatgtacccattgtttatcttgaaacgctctacggccaagtcaaactgtaccgtgtcgttcttgagatcgccgtccacataatacatcttggacatcatgtccttgtatgccttgccttccctgtggacttctatcgtacttctgtacgattttaatgccatctccatggagtataaggcttgatgttctgccattcaatccaaggcaactgatccccactcaacacaagatatattttattaaaagatagtgacaagaaacggaaactatcctacttttcatggaataatgacaacaaatttagtcagaaatcatttcaatagtaatgcattgattattgcctaatataacgtgagttcgaaataagaataaatatatttcacttataattagaaatatagtgataaaagtattaaatttatagtgctgaattataacatttaaacgattaccactatgtttccagagtctaaagttacagagatttattgtatggccgatgatttttgcaaggaatttacattgcaacaggaaaaatatatgattaaggatatgaagaccatgcatcgtaacaaacccaaccgtatgagtgatgcagagattatggttattctaatcctgtttcactccggtggtttccgttgtttcaagcattactacaaggagtatgtctgtaaacatctgaaacacctttttgtaagcactcaatttagggcataccccttcgaaagggcacttttcagtgccctaaaccgagttttgttaaaaaattagtcttgaatttaacattggcttgtagccaaagtgattttgtcaggaaccatgttaacataatccctgcacccgttaaagatatttttgaaaaaagttccgatgaagttccagatagaactgccatgaagctttaccgttccaatcacactgtgataggttgccgccatctcagcaccagcatcactaccataatgaagtgaattgttgcgttgagtagtcagctttcgaatggttcgctcagccaagttgttgtctatcggtaattcaccatcatccaagtaagcaaagatctctttccagaaccggttcagataattgagagcttctttataatactgacttctaaattctgaatcctttgtcagttcactatctaacaagctgcgcaactctatcagaagttccttcgttgccaggctttgcctttctcggaacctttccttgggagttaatccggcatcatcgtatttacgctccctcataaagaactcctttaaaatttcggaaaagcgttctgcattcggttcactaccctgattggaagccttgacaaacttgttcttggcatgtgacatacaaacttggtgtacagtatctttaaaccggcctgatttcagctcattgccgataaatacataagcattgtatccgtcggacataatactcttcaattctgcatcgcccaaaaagtctgtaagtacatcacgaccacgcgagccattctcatagaagaaaatggctgttttccgagccttgttgaccagaacccaaatgtagcacttcttatagtgatcgtatttgcgcactttacaccaggtctcatcgcagttcacaatcgaatctttttccaaagctatagacttcaatacacagaccaattcgtccaggtatgtcttacctttcttaagccagttgcgcaacgtgtttttagaaatggtcatgcccatatctgtcagccattggtgaagaagaccaaaagtcacattctttacataaacttcataggcaatagcctgcagaaattcaggagaagccttagtgccttcaatattggttactacctcaggatgaccttcggaagggaaataaccccacttgggctttttaccaggctctgcataatgaaccatctcgaagcattcttccgtcaagaaagtacgaaaactgaatacccgtaccattcttctttcaatgatgcgaccgggaacctttgtcaaatcggaaggatgctctatcgcctctccaactactcccatccttttataaccgtcagggcgattggataaatcacgctctttcttggaagactcttttacctcttgagatggagcatgaccaactgaatccgtacgaagcgtatcatcggttccatcataatcatccttctccttccggcggtctgaatcacccggcttagctttagatttgatcttttgacgtctatcaccaaaacgttcctgatgggcataatcaagtttttcttgaagtgattttatcttacgctcagccgatttgcgaagtttatgctcttctgacaaccgattctcaaggtcaacatgtttcgattgcatggatgacatctgacccttcagttctttcatctgagccataaaatcctccaaaacaagcttcatggcatcacctgtcaacctgagatcctgattttgctcagcaaggtattgtatgtatcggtctttctgatcctctgccatacctgcactataatttatagggttgcgtgagtaggttgccctacccaacaactctcgttttgttgtaattatatcttgcagatcgatcatacttaaacctttgatttacaacattaaaggtaataaaataatcgcaaaaccgcaagtggataaatagattgattatctgattttcaatgttttaactataggattctcaagaatcaaaaccacgtccttccaggcaatccgataaacagtatctgccccgttccgctccactttcatgaactgatagcctgctacaaacttcttttcgaacagactatatgaacgattatcaaatgaaaacatacggactattctgcgattgcgagacatgactataaagacgtctccatcattgggctcacggtgaagccgttcacgaatgacagacagcacacggctgtgtttacaacgcatatcggtgaaatcacggacataataaaaatgattcagaccggtaacactcagcataacccctccagtttctctaccatacgaaccaaatccgggtagcttaaattcttttgggacaaatgcaagccattgctgatacgaatctcaacccaaatacgaaccggatgatcatttctgcctggtaataccggttgaggttgatcaatggcactggatttttcctcatgaccgattacaggagcaccatcaacctggacttcaactacttttttccgggtatccctgtaccatttctgaaagatgttataaggaactttgttcttaacacaaaacgattggagagattctccatgaggcaaagcctcggtctggtactgaaagtaaaacctttcaagatcttcactgctatacataaattctaaaatttttgttcgcagcgaagatagagatttcaattatgagccaatttttgactgcttaccacctttttcctcgtcaggtttctcataaccgttttgtggaactggagaaggaggtattgcttcccatgaccatattcattaaaaaagtactgctgggaacttgtaccggcatcagtttcgttgattccactcccttatgtgtatgtcgtaaccaaagaatcttgattcataagacatttgaagagcttgccgagcgtggaagatgttctatggggtggttcttcggattcaagctgcatctgataatcaatgacaaaggagagcttctcaatttcatgttcacgcctggaaacgtggatgaccgggaaccgttgaaacagggtaagtttctggaaaacatcaaaggaaaactatgtgcagacaagggatatataggtcaggttctgtttgaaaaccttttccttaatggcatacagcttgttactaaagttaaaaataatatgaggaactcactgatgagtattgccgacaagattttgctaagaaaaagagccttgattgaaacggtcaatgacgaactgaagaacatcgcacagattgaacactcaagacatcgttcatgcagtaactttatagccactccttgtcggctatcgcggcatactgcttttttgaaaagaagcccgccattgacgtaaagtttgtcaatgacggacaacttgctattttttgattttatttcgaactcacgttaatatatttttaatgtttttttatttatccttccatgcgacatcaaaaagcctgtatgaaaaattattgtcaatacatagtatcaattccaacagagtacttttctctggtaagcactcaatttagggcataccccttcgaaagggcacttttcagtgccctaaaccgagttttgttaaaaaattagtcttgaatttaacattggcttgtagccaaagtgattttgtcaggaaccatgttaacataatccctgcacccgttaaagatatttttgaaaaaagttccgatgaagttccagatagaactgccatgaagctttaccgttccaatcacactgtgataggttgccgccatctcagcaccagcatcactaccataatgaagtgaattgttgcgttgagtagtcagctttcgaatggttcgctcagccaagttgttgtctatcggtaattcaccatcatccaagtaagcaaagatctctttccagaaccggttcagataattgagagcttctttataatactgacttctaaattctgaatcctttgtcagttcactatctaacaagctgcgcaactctatcagaagttccttcgttgccaggctttgcctttctcggaacctttccttgggagttaatccggcatcatcgtatttacgctccctcataaagaactcctttaaaatttcggaaaagcgttctgcattcggttcactaccctgattggaagccttgacaaacttgttcttggcatgtgacatacaaacttggtgtacagtatctttaaaccggcctgatttcagctcattgccgataaatacataagcattgtatccgtcggacataatactcttcaattctgcatcgcccaaaaagtctgtaagtacatcacgaccacgcgagccattctcatagaagaaaatggctgttttccgagccttgttgaccagaacccaaatgtagcacttcttatagtgatcgtatttgcgcactttacaccaggtctcatcgcagttcacaatcgaatctttttccaaagctatagacttcaatacacagaccaattcgtccaggtatgtcttacctttcttaagccagttgcgcaacgtgtttttagaaatggtcatgcccatatctgtcagccattggtgaagaagaccaaaagtcacattctttacataaacttcataggcaatagcctgcagaaattcaggagaagccttagtgccttcaatattggttactacctcaggatgaccttcggaagggaaataaccccacttgggctttttaccaggctctgcataatgaaccatctcgaagcattcttccgtcaagaaagtacgaaaactgaatacccgtaccattcttctttcaatgatgcgaccgggaacctttgtcaaatcggaaggatgctctatcgcctctccaactactcccatccttttataaccgtcagggcgattggataaatcacgctctttcttggaagactcttttacctcttgagatggagcatgaccaactgaatccgtacgaagcgtatcatcggttccatcataatcatccttctccttccggcggtctgaatcacccggcttagctttagatttgatcttttgacgtctatcaccaaaacgttcctgatgggcataatcaagtttttcttgaagtgattttatcttacgctcagccgatttgcgaagtttatgctcttctgacaaccgattctcaaggtcaacatgtttcgattgcatggatgacatctgacccttcagttctttcatctgagccataaaatcctccaaaacaagcttcatggcatcacctgtcaacctgagatcctgattttgctcagcaaggtattgtatgtatcggtctttctgatcctctgccatacctgcactataatttatagggttgcgtgagtaggttgccctacccaacaactctcgttttgttgtaattatatcttgcagatcgatcatacttaaacctttgatttacaacattaaaggtaataaaataatcgcaaaaccgcaagtggataaatagattgattatctgattttcaatgttttaactataggattctcaagaatcaaaaccacgtccttccaggcaatccgataaacagtatctgccccgttccgctccactttcatgaactgatagcctgctacaaacttcttttcgaacagactatatgaacgattatcaaatgaaaacatacggactattctgcgattgcgagacatgactataaagacgtctccatcattgggctcacggtgaagccgttcacgaatgacagacagcacacggctgtgtttacaacgcatatcggtgaaatcacggacataataaaaatgattcagaccggtaacactcagcataacccctccagtttctctaccatacgaaccaaatccgggtagcttaaattcttttgggacaaatgcaagccattgctgatacgaatctcaacccaaatacgaaccggatgatcatttctgcctggtaataccggttgaggttgatcaatggcactggatttttcctcatgaccgattacaggagcaccatcaacctggacttcaactacttttttccgggtatccctgtaccatttctgaaagatgttataaggaactttgttcttaacacaaaacgattggagagattctccatgaggcaaagcctcggtctggtactgaaagtaaaacctttcaagatcttcactgctatacataaattctaaaatttttgttcgcagcgaagatagagatttcaattatgagccaatttttgactgcttacttttctctgagccgttcgctccaacgatacaattgacttgttatctgcatggaaaccgcaaaagtatcatccccaaaacaagaacagtacatctgatttaggaattttctccttcatcttgttcgttatccatccatttccatatgttctgttcggatggctccatggtatttgccgaaaggatactgtgtccttcatgtaatttctttattactgaacttcttcctgtttttaattttattccaataatctttataaattcgaataaatacttggttacttcaagcacactctgaaatatatcccaacagacaaaaaccgattgtcatacagtgctgccaccacattgatccggtctttccacaccgaatagtttgttcccacgttccacacgccgtcataatattctcccatcagatttagtccgttcaacgctttattccaaaaatcatcttcagtacgattgaaacggtaatttatgcctaccgtcacgccgtgttcgttgtcaaaatccaaaccgtcaaactggatgactgaagcgtgtaaacccaatgttccccatttctcaaaagtaaaatgcttggtagcagctacatagaaacgggtcagatgattggtgctttctcctacatcttgaaatgtaaggtcaccgccgcctgcactctcgtgactacccggatcattcgctcccagcacgatttgtggtgtccattgctgccaccaaccttctttccacagacgcaaacgcccatgaaacgaacggtcttgattggtaaatttgccccaagtctgctgcggccagtaattgctgccatgaatgccttttaccagcgtacaggtataagctatttccaaccatggaaacagcgtaatgttcagatagtagttataagtataaggtttatactcatcatgggcattccaataggcatcacgataaatattgtggtctatcatgctgccaccaatcatgacagtcttgtctttctgcatttcggctgtaggagaataaagcagccctgatgtgccgtaggtatgctgacccaacatattggtcaccaaacagcacaatataataaaagaataaaaatatttcatggaaagtcttcagatttttgatctttttcatgcattattgacttttcagaattgcgtttttacaaattaaaacagattcaatactttttctacgatgtggtgcatgtcataatacttatactccgcaagccttccaccgaagataacgttcgtttccttatccgctagctctttgtatttcagataaagcgcattgttcttttcgttattcaccggataataaggctcgctgccttccgtccattccgaactgtattcacgtgatatgaccgtcttagggcaattgtccacatccgtgccgaacatctcaaaatgcttgtgctcgatgacccgtgtgtaaggcacttcccgttccgtatagttcaccaccgcattaccctggtagttcggagtatccaatgtttccatctcaaaccgcaccgtgcggtattccagtttgccgaaccgataaccgtaatattcatcaatggctccggtaaacaccaccttatccgccagagcttccaattcttcacgatgagcaaaaaaatcacagcccaaccgtgtatctgctccgtccagcagacgctctatcaacacattatatccgccgatgggaatcccctggtatttgtcattaaaatagttattgtcgaaaaccagacgcacgggcaacctcttgatgatgaaagccggaagctccgtacatttccgtccccattgcttctcggtataaccttttatcagtttctcgtaaatgtccttgccgataagcgtttgcgcctgttcttccaagttgcgtggctcgcttacaccgtccgctttcatacgcgcaatggcttctgccttctgctcttctatcttcgccttggcttcggcaggggtggtcacgccccacatctggtagaacgtgttcatgttgaacggcaggttgtagagcttgcccttgttgtttgccacgggtgagttggtgtagcggttgaactccacaatcgagttgacaaagtcccacaccttcttatcagatgtatggaagatgtgcgccccgtacttatgcacatggatgccttccacatcttcacaataaagattcccacccaagtgtggacggcggtcaaccaccagacattttttgccctgttccttggttttgtaggcaaagacagagccgaacaggcctgcgcctactattaggtaatcgtaatgttgcatgaataatacttaaatttaatgtgtttttttattttataggtttatcgactctgcgtatacttcttgccaaagaatttagctgctaaaaaatatttaatcttttggggccagttctcgtttcccatctgtatcatctttatctccttatgtgaatacccattggtctctatccatacatcaagcagtagttcactgattctgccaaacagacgggcgtcaaaggcaggcaaggaggagaaatctatctgtttttctactttaaatagaatgtcaaacagccaagcgcaatactcatccgcataactctttttcatgatgaacatgttgaacatgtgtccccaagttcttttcatcacttcgttgaaagcaggcaggtattccggatagtcttttgcgataatcgcttttgtcttttccaaatgtgaaatatcatgtgtgtgctcgtaatgcgaccatagcgactctatatagtatctccgcttctgtggcaatatgatgtcatgttctttgcatagcgcttgggcttcctcctttgtcagcagacattgccacttatcttttccgtgtttcattccgaggtatctgcggtaatgcaccaacccgatataatcggctttcagattcttccaagcccaatagatagcagtcaattcactgtaataaggattcttctccgagatattctctccttcattatcaggctgatagcctaaatccaaatcgggatgcagagcctttcctacctgtacgggcaggtacacgtcactcttaggcatctcacactgcttgtgagccgccaccaaaatcttgatgttcataaaaaagttggaaaatatagttttagaaatcagttatttctaattagaaagtgtatggaattaatggatgccacatggcgtcctctatttcttctgtataataatggctcttgttttttgtctttatccgctgatgaagacaaaacttattttaatttatctacaacacatgctccttcataaacgggattttcatcggaatatacatgcagtctgatgaatcagagtgtgaacagcaggaagaaacctatgaaatttaagatgggtacaaccatctcttcatttatattcaaaaacttataaacgaaattgatgaatacaggatgcatcagataaatgccaagacaatagggtgccagtttgttagctatgttccaattcatattcaatgacttaaataaaaggaacaaggctgaagccaaacagattacgacaggagtagcgtaaccgtaaacgtcaagtctataataacatttcgtgataataatcccaatacataggataatgattacaatcagaagcattttgttcccataaatcttttgtggaattttccaacacaaccaatatcccaacaaatagataaacaaataaggagtggaaaaaatcatataccctgtcaatccaactcccgcggcattcaaagtcgggaataatgatgacaggacaaacaaacagtcctaaagcagccagccaatccttattcgaagctttcactacaaacggcttgataacaggtgtaatcagataaagccctattaacatatacagataccacatgtgtgcccacgaatgtcctgttgcgaaatgtataatactattaatttccccccccctccctgtttgctaaaatatgtttcaattaggcacataggcaagctaaatattaccaatgccgaaacgattcttttcacatatttacgcccaaacaagccaaaaccaacttctttagatgggtttaagaataaggcgcccgaaatcatgataaagacagggacaccgaattgcatggtatatttataacatgataacccaaattgagtatcaagatttgtgatttctctcgcatcaagtaatctggcactggtatgtaaaaagacaacacttagagttgccaataaacgtaaactgtttagataattgattcgcatgatgaatactttcaattaaaatatcttccttccacccattgcccacttaaaatagcgtgaacaaaatagaatgataggaatttctattatcataattatgatacaacttataacggcataaatgtaccaagcccaagaataaagttcaaaaatcgggaacttattaatagtcatattcagtatgaaaccgtgtgtacacaatataacaatcataccgcaactaagcacataaacccacttgttcggacgtttcaataaatgggttgagacgattgtcaatagagttccacacagtccggtgagatacattaatagaatataattccctactttacagccttctaatgaagcaaagccattgaaaagaaaaccgattatataaaatacaaagatcagaccgattgtccaacgtttgcgttttatccaagctactgtctctttgtactttaattttagcagaaatccagcaaggtaaaaaggaaaaccaagcaacgaactgcccaaatgaaaataattaggtatttgcggaaagtccaatgtgtaatacaatgtcagtgctgtaatccatattatttctataataagtaaagacaagaaatcttctctgattttcaagagtaagaacataatgattttcatccatatcaggcttaagataaaccaagtcggaccaacaggaaagtcccctaagaatgtgctttcgaaaaaatcttttaaaaagtcatataccgttactatcaatccatttgtctgtatatccttaattttcgtcagcaaagtcaacccattgaagatgaagaatggaatcactaattgttttacaagtgaaacacaaaacttaccccccccaattcttaatttatgtaaaaagcctgataggaagaagaaaagaggcatgtggaatgagtaaataattccctttaataacagcgtgttgtctttaacatgccctaatacgactaagtacatccctatggttttggaataatccaaccaatgtaaacgttcttttttagatacaataacttgactatcattattcatagcatttttcatttagattcaaaaacatatctccatttttcatagataactttcggagataaatgctcttttatgaactctctatgtttagagcacttttgtctgaaatcaggatgttctatcatataaaccatggcttcagacaatttggaaatattttctttttcaactaaaatgccgcctccttctgccaacaattgtgcgggaccttctggacaatcgaatgctacagaaggcattcccaaactcatcgcttccactaaaaccatggggaaaccttcatatctggacgataatacaaaaaaggcactctttgcaaactccccatttatattatccgtatatccctttaaaaatatgttcctttgcaggccgagagtttgaatctgcgactgtaatgcatctttcaattctccttctccgaatatgttcaaatgccaatccggatacttatcaaacacgtcttttgctgcagatatcagcatatcaaatcctttttgaggatgcagacgtcctacagcaatgatggttttactagttaaatccagtttaaaatcttctttagcgattgccatattagggatagtaactaccttattttgcgaaagatgtttgcagaatttcgtctggtctttatctgtcaatacgattatctttttaaagaaagaataaacaaagcatcttaaagccctgactggtttcggatacaagtcatacttgaaatgttcacatcctaatacatctttagattctcctgccaaccataacaaagtattggcaaaaaaattctggctgataaagacattctcttcattcttgtttatttgtgacctaaaaaaatgttttaatgcctttatgctatgataaaaagaacgtaatcgagctatatatccgctatctataggatagggttcattcgataaataaacgattccgacttctgtcacaggctggtaagtaaccttttctttccctctgttgaaagaaataatagttactttatgtcccttacagacaaacaaattggataaattgacagtcaccctttctgttccgcctgttaaggatatgtcttggataaaaaaatagatattcataatattcaaaaatgaaatattaatgcagtctcaaaaactcatcataattctgtttgatgacctttaataggttcatcgccagtgttacatattcttcatttttccgaataatacgtgccgtatcaaaatccgacattagttgaggtattttatctataatagaagcgagttgattcttatcctccaagataaaatgatagttctgctgattataatctttcaaaattctatatgtcttagaatctcctgtagacgagaatcggtctttctcccaatcaatagcgattacaggtttacaattacgcaatgcaaacaaagagtcatgaaaacgttccgttatgatgatgtcgcaatacctgaatatacccgcccattctttcggcccaattgtgtctattcgaatatcggcatatggattgtaaacagacgatgcaactgtataaccttttcttcttattaaatcagccagttctttacggtaagggaaattgggactgaaattataaaaggctattttctttcctttcagcttgcggacataaaattcgggtaattgaaattcattgatgtccaaataataagaaggatcaggttgtttatatacaggggtattcactctcattttattcgtaaacaagtctactgtcaacccatcacgcaatccgatataaataaacttatcggctataagtttcaatctttccaacagagatttgtcgttagcgaagttggcaggtgacgcactggctgcgaaaaagacatgtggggcattacacaattcactggaaccccagtttaagcccaattgttggctaccacctgttaccttttccaaaatagtatcacttcctactacaaccaaatcatatttccgcaagatagattttgctttgtctatgtcataatcaaataagtctatcgtaggcgtataggaaaatacttgttgctccagttttctgtatttcaacaagcggtaagccgcaaatgccttttgaagcagaacgtgcccaataaaatctttctttccacgtttccccttgtcccatttgaagtcggggaaactaaggtagttgatttctgcattgggaaagattttcaaaagcccggttctcaccccatatgcctgcataaaagttcccggattcaagccacgggagaaagtaatgacgagaattttcattgattcctatgttggtatatattttttaaaatatccatgacaaataaatgccttcttcgtttttcaaggaaataacgcatctttttatatactaaatacacaatggcaaaagcatcatattttttgaacatagatgcatatatgacattgaatatgtaagttgggactttatgatatatgtatgataagttctttcgctcccatcttttatcccattcaatgtcacaaactgcaattttcgggttataaggcaagaaatctttccattcagctttttctatatgtatattctcacttgctaccaattctttccctttattggaatgaactaaaataagtgaagcaggttgctgattttctacgtccttttgccaataatcgcctaaagtcaaatcgctatttctatgcaaataagcaaacttacaatgataacaggaatagcggttagttaaaccggataagaacccagatattagcggattcctataaccagcacattccttctcctcattatgcaaataagttaaactgtattgctgtttttcccgaaatgataaaatctggctattggggtaaattttaaagaaacaattttgcaacaaggtggatgggattccaccacaaactaaatctatagtatataaattatcttttttcggatgattggaaaagaacgacaagattccagctacattacatggtagaccagaatataaaacccgtttcccttcctttagcttttctttaataacatcataaattccactttggtcactatacatatattttgaaccttgcaatctagatatatcctcaatcctttcaacaacaatgtgtttgcactcattttgtagtaatgcagctcctataacaattccgccactcttgacgaaatcataggcaaccgctccgaaaataccaccagaagttccattcgttctatagctcgctaaattactccaacctttatatggaactgtggctaaaaaatcattgtttccatagtctttcccgtttataatggggcagactttttcacaagctccacattgaacacatctatttgggtctatggctatataatagtgaccgtcattttgcaatatcttttttaaagctttttttttacaagttgcaacacatgcacaacatgccgtacaattcctttcatttgctaaaacaggccaactcataatctattaaaataatcaacgtattttttgacgatagattctatagaaaattctctatgcacaaactctttttgtttatcacacaaactgcgataaatatttacatgatgatctattgcatattgcatgaccgtggctaatgcatccgagtttttactttcaaatgtaagtccagtttcgttgtccgttacaaattctttaaactgctcaatattagaagtgattgtaggcaaattatacctgaaagcaactgtgatggcaccgctttgtgcaatgtcttgataaggcataacaaaataatggctgtctgcaaacaagtctgcgacatcttcattcggaatacgtctgatatataattcaaaatattcgggatgttctatcaaatcctgatatttttcccactcttggcaagcaccggcaattctcactttaaaatttgaatatcctttccgcaccaatttatttgctgcctctatcagcaaatccacccttttatattcaaggatatttccaaaaaataaaaagcgtataggataagtgtgcaatttgtccggcatttcttttggctctccatagtctttcaaggccaatggagccattaatacatttttcccactatagagggaaaccaatttgttatattgcccttttgaaaaaacctgtatgtttttgaaataggtgagccaacaagatgtatatatcttagctattttctcccatttagctccttggggagtcgtcacattatggcaagcagctacacatttatctttcggtaaaaagaatttatagaataaaagggcgtgaggcataccatacaaacttatatagtaaatatctggattaaaagtcttggcttcttctacaattctataataacttttccatatttttggggaaacagatcgacattccagttttgtaaatgatataagaagattggacttatgtgtcaatctatgctccacaaatttcttattatcgataatagaagcattacggctaattactatcatccactttatagtgaaaatttggcttaacctgtcaacaatcggcaagtctacatcgatataataatctggagtaatccaacttattttctttttcatcattttctcttgtctatagcaacatatttgtttccacaaaaagccacggcttttccataagcacaaggacctttatggcttgtattataagccagcaacgccaactcaaactcattgacggcctgtgcaggagtacactcccctttccacaaagtggagagcgggagtttgccttttgtcaatacatcttgaatacccaattgtctcacgatgatatttccaatctcatcttgccatccatcatccaataagatctgcctaataaaatcattaatatctggagtttctgttgtatccaaatcatacgagaggactgtcacgccaggaagagccacctctaagtcttttacttccaattcattcatttttactatctttttaattacaactttaatattaactagtcttgacagaaatcatatcttgacaatataattgtaataggttcattttctaataatgatacctataaacaaattaatgacattgtaaaatgtatactttaactaaaatatggtttccgtatattatgaaaatatgcgaatccagtacaatcataatcgaggttttgctgacgtacgcctactttctttgcaggtatgccggcatacacaccataaggctcacagtcctttgttacaatggctccggcagcaattacagcaccttctccgatacgtacacctttcaagataattgcgtttattccaatccaaacattatcttcaatgaatatttctgcggcttcatagtcgaaatgccttgagttgtagttatggcttccagatactatttttacacaatgtgatatagaaacattatttccaattgtgatgccaccacgtgcgtcaagcatacattgcctgttaatatggcatttctcacctattattaatcttgtagaacccaagatatagtatcccatatcaataatcgctcttttccctattttcacacctaatagtttcatatatacttttcttataaagaaaaaaggaaaataagaaattaaataatttaatataaatcgcgtgaatatttgcttaaatggtgataaacagctattaatgttcatatgatttaagttgtagaaatttgtgtcggaatggttgaaaacttgatgttattatcatggtttttcaaaaagttcaatccatctgcctcctatggcatttatgtcaaatgtttggctttttctaattgcatttgctgatattattgacattttctctataggttgagacaagtatgacatgactttttttgcataactatcttcatcgaaagcgggaacaatgaccccattgataccatcatttattatatcatataaagagggaaatgagtcaaaagcaaatggcacacaaccgtattgcattgcttccactaagaccatggggaaaccttcatagttgcttgtcatacaaagaattggggctcttttatagtattctgttggatttgtaaacccatgaaatgtaatacgtttcaggcacatactatgagccattttctcaaaaaagacctgctctgtaccaccaccaactatttcaagtttatattggacgagcttgtcctgcaatattttccaaatattcaagagtgattgaaaccttttttgactggaattgattcttccaacatataggataattttttctttctctgttgaacgtaatgagtatttgttatcgattactaaaggatttggcaatgctattacgttttctgacttaaacttatatatattcaaaaggtctgttctaaaactttccgataagattattattttcattccatttctattaagccttttgaaagaagcattaaatcgtacacatttacgtatattaccagtaattttgtctatccatgttcctttcaagcatttaggaatgattgaaacacttttcctaaaaagttttgatggaacgttatgcacatgaaaaaaaacctttatatcttttagatgagaaaaatatctatataattcatagtcaacaaatggatatataacaatgtttattttattttccttcattattttatccaaagtctcaatatattgcggactacttattggcgcatccacatgaaatgccttggtgtatacagaattttcatcatatgatgacgatattctatacaccgcatatacattgtatccatgagaagtaaaataaggggttagattatgatacaccctttctactcccccggaagtaggatcaatggcattggcaaatgtaatgatgatattattcataatgaatatatttttctataagtgaagaaaatcggtcatattgtatttctggagcgaaaagacgtgctcttgtctttgcagcaacagccatttccgacaattttataagattcccttttaactctttaattgaagcagccaaattttcagccaaattactattgttaggaagaacaactgcacatttttcatttacaacttcaaccatacctccagattttgtaataacgacaggtttcccacaaaccaaagcctccaaacaagtcaatgcaaaaggctcttcccatattgagggaaatgcacaaagatttgcaatattataatatttatacatatccttatactccacaaagcctgtaaatttcaccctattacccaattgtttgattagtggcaacaatgacttctcaaaagaagactggattgatgaagaaaaaaagtaactacctacaacaagcaactttaaatcacagatatccgataataagagcatagcctccagcaattgtttgacacctttaaattcacgtaatctgccagaaaacataatgataaaatctttatcatcgaatcctaacattttacgtaaacaagatttttcctcatcaggcataaattgctgaaacagagaaaaatcgatagaattataaagtaattcaatatttttacaatattttccttcgaattgctgtagattttgacatataaatttggatattcccatatacaaataggtagatttggcactttgaatagtaaaacgtacagcagttctcggaggaatattatgtactcgctgaattataggcaatccggtcttcttctttagataatgtgcactatacgaagttccttccaatataattgcagcataatcacctttgttcttatttacatttttagcgatttgcctatgcagtaaaaaaggatgataaaaaccttttgcccttaaagatacataattaactaatcttgtaacaaaatgatttatcgcccccctatggtcatgtgtttttacaaaacaaaaagatgtataagaatatagttttgctgcctccaatgctttctcatcgtatattgaataaacttcaaataagaacttttttcttttttcattttctttgattaagagttctattaaagtttctacggctccaccacgtactgcaggaagaggtaaagtgccattatttactactattatttttttcatctgaatacacgtgtattaaatatagaaccatgccttgtatcaagaaacaaccttgacgaacaaactcagcagatgtaaaaccgcaagccaatagatagccaaaccatagagtcaaatataatttgttgcgaggtacttttgtaaagaatgcttttactgaataccataccattgctatcaagctcataagtcccatcatccagctcattccaagaataccccaatcataataatgaatgccaaatgattcaagattgtcataatatctaccataattactgattataagcctattaggaatacctgatcccaagagaaattcgataaagttcgagaagtgttgactataataataaaacaatgttgtatatcgaatataatctttattcccgaaattttgatcgttctcttgtctttccagcatagctgcgaaagtttcttgtccaaaggtcgttaacgagaatccccatataatgatgagaaggacgattattcctacaattagcctataagaaaatccgttaattttaacaatcatccatattgaaaatagaatagagaaaaaaagtagtgttcggaaaccaaacaacatcattaccacagctgctaagactacaaatgcgagatatttataatttcctaaaagaagtttattcaaagaataaaacaaacctataccaacaaggctcattccaggcatacgaatacgtcgcagtagaatatccaatccttcattaaaattatctcccgataatataaatacaggtttagggaagacaataacttggtaaatatagcaaacacaaaaaataatgaacatccaaaaaatcagtctttcaacgacattgggagataatcttattttaaacaacacaaaataaattacaattgcaccataagtgacataacctggcaacgaattaaacaatgattgtccatgaaatagcaaacatgaaaacatgcttaatatcatgctaatcattaatatggatacggggcgtgagaatgttgtatctttattgcgcagaaaaaaccaaacaccaacatatacaataaacatcactcttgaaagaggaagtaagccaaacaatccatcgcataaccaaaggaaaattgctaatataacgatgaaaggataattattttttttaaatatcaagtcagtcattgaaagacaaaaaatcttttgatttaacaatcatattagacaaattccaagctttttccaatatgggcatatctatatccccttggctttgcagagttatcgtactttgtttcagacctatggtattcaacaaatctatagcccgataatcgccagccgtattaaacaacactgtttttaccggtttgtgaaataacacggcaaaggctgttccatgaaacgatgtggttactacgaattttgcatttgcaaaagcaccaacaaattgttgaggggaaagcattgaatatctcttttttcgtgggaaaaaatcagcttcagctgtaatctccatgatcttacaatcattggatatacttaactgttgtgcatatctcaatacatttctatctcttttcacctgatataccaatatatagttttcttctttaaaaggttttttactaaaacgtaaccaatcttctactgataaaagaaacactggatcaagtacttgaattatttttttatttgtcaatgtctgtaattgttctttaaacaaagattcacgcaccgatatcttcgagaaacgttgcaacacacctttatatgcttctaatccttgctgattaggcttaatttcagaactgacagcataggaaatatatttagcatccgtctgaatttctgccgtataaaaagggtctaagccatttgttattttaggattccaaatttggtcacttccacatattaaataatcatacccttcaatgtgtttgtccctccaagtatatatcttagaagaggttggcaattcttcaataaatctataaaagatatttgcacgtttctttctgaagagcaagaacggaaatattttcactaaaaactttattttccccaaaggagacattttctttattcttgcataaggtatcatgccatgagcaaactctatggattcgggacgataatctactatttcagcatcatgcccaatgtttttaaggtatgtaaccaaagcataggcttgtaaaacagccccataattatgtgctctgtgaaatgtaagaattcctattttcataatcggactatttcccgtaatacttttctgcaaaattcacgtgttttgtttatgatgcctccattcccatactttctgaccacataattaaaccctttatgctcataatcaaacgcgaattcattctttcttggattcccctcagatgggtgttggagattaagttgcagggctttttctaatgggactttcttgaaaaccaagtcaacagaggcttctcgcaatatttctcgtcctttgggggtgttgcataacacaagagaaattcccttattgtctttattcatttcaggaacagttctctcatatccccaaaaatctcctattgttatatcagaggggcgactaagattgcaaaacttacaacattcgcatgaaggtcttgtgcctaaacccaaattaaaaaaaacacgcaatttataatccttgtaagttttcccatttgcgagcttgaaactttcaagatgagtttgataccaaccaatagatttgtctctaaactcaaggctgaccactcttgatttgcattttctttctacataagcaagataatccttccatatttgcggagcaggtacggaatgacaaattatatctatcaaaatcagattctgagatagctgattacctatgtaacttttcaaacctgctgtttggcatggagtacctgaaaaaagaactaactttccagcctttaaatcgttctttacatttcggaagactcctgtcatatcgctctgtacatatttactacctctgaatgcatctctttcttctctggtggtagctcgtttatgaacaacaacaaaatgacctttataaccagctccatagatgacacctcctttacctagtatgtaatcagaaaatgccacaaatgcagctccactacgactatatcttaatttcgttatatccttatgccgtgcggcgtatgcatccggttggggcaggttgaggctcgtgtcataatggtcattgaaagcgcaaaccttctcacacagcccgcaatccacacatttatctttatccactaccggataaagaaagcctaatgcatctggctgcatcgtaatggcatcatgcgcacagatgctggcacaagccgtacagccacaacactgtgatttgtctgtaatctgaatcatttgattatatgtaaagtttttaatgttctgttaaaaagaatagttaccatcaagattatgaatggtgaataatacagataaatgtcttgccatatattggacaaaaatttgtttactacagaaaaaaatgttatgaacaacggatgaaatatatatatgtataaagaatctttttcgcctaatgaagaaaaggcattggcttttgattgttttaaagacaaaaacaacgtgaataatgaaaccgccaagaaagtagaactgatgtaatggtctctggttgaattcatgttaagttccgtaagcaacctgttttctaacagagaagttaatgaagataaaatccccccccccctaatgctaataattgtaaatggctaaaattcaatatgcgttctttctgttgtttcagcagcatccctatcgtaaaataaggaagccctacacatgcgaaattacgcacccatataaaagggaactctttatgccataagaccaagctgtatttgccaaagcacaaatccaataacaaaagaacagggattgcccaataaatatagccaagcttattacgtcgctctaaaaagaggattataatcagaacatataggtatgcacctatataccagagatggaagccaaaaggattttcattcagtaaaatgaatttacctaaagattccagattcaagaagctaaaatcattattcttgaacgcaaaaaggaatttcacagcggcaaacagcaacgtactccatattaatatctgaaccattttcttgatgcctcgccttaaatgcccttccaatttcagtttgtcatttgtaaaaatcagataacctgaaatcatgaaaaaacatggaacggcacatcgcgtaagaggtaatatgtattcttgatagggagtacgtacatgaagaaatataaccaagacggcacacaagaatttcaaagagtctatattatacaaccgtttcatctaattttatgaattattatatgcaatttatctgtaataaacttccgttcaatcttgttgcaacctatataatagatagtaattcccgtacaaatgaaggagacaagacttgacaatataaaattcaggaaagattccataaaaacattcgtcattaagaatggaagaacagcggcaatgactgtcacaaccaatacatttacatagactttcttcatatatttcctgacggaaaggccaatcatttcccgtaacatcaacaggcgtgccgcaagacaacattgggaaataactatagctaccacaagtaccacttccgggaacatctctatacgcaacaggatgtaggaaacaggcaggttaatcatctgcaacccacctaccacaagctggtagttccgtatacgtcccgtagcaagcatggcagttatcaacgggttggagatggattcactcatggcaaacaccaagaccagttgcacgaacaatacggcatggtcgggcacaattttcagccaaagccctaatatataatgtgtgttaatcaaaaccggaagggagagcagcaaaagcatataaaacgaaagccttgctccctgaaagattagagtcatcatgtatttacggtcacctgccgcatacgatttggtaatttgcgggtttagcgccgtcatgaaattggtaacaaaaccgctgatagcattgtttacctgaaacgcaattccacgtgccgcattggcagccggaccgcaaaagaggttgatgaccacatttccgccttgatctcgtaacacagcagaagttgcaccaataaagttccatccggcaaagccgaacatatgtttcaacaaatccctgtcgaatatgaaatgatacgtgcattcttcaaagtgtctcttgcaataaaccccgtatgccaggcggactatcaatgcaaccgcacacatcaaaatagcatagaatatcagcttgtccataggtgaaattacaatcaggaaaacaatcgccagttttcctatggcttccaatatactgatataagcaaaagcagacattcgttcatgggcaatgatgcttgcattatatggaacgctaatcagattgactgcgaacgtcaatattgaaaattgaaatacccagttggctgctgttattcttacatcaggaatattcatcttcatgttcaagaaccatacgcctattgcttcagccactacaataattaatatggctagccctatttgaatagtaacagatgaggagaatatttttttcagattctcctgattgccttttcctaattcgtaagtaatgaatcgggtaatagcagcagacaacgaaccggatagcatagaaaacatagccactacaccgccaaccacattatagataccgaaatcttccacacctaaagcatttagcacaacacgcgaagtgtataggctgacagccatcatgaaaagcatgcggaaatacagcagtaatgtgttcttggctatgcgtttattgtttgctgaagtgtcggtcataagattttaaaattgcacatccaattttatgctttcaatattcaacaaccgtttgaattcctgtttcttctcatctgtcaatgtcgcatcattgttaatccactgttccgcaaatcgcatttgtgcttttgccgcattgacaatgtcattacgcatagattctattattccccttttttctgatgaagtttcagctgaatctaatttttcttttaaatctttatttgtcatgattttatgtatttaatatttaatcctttctaaaaatatcccgtgtatacactttctctttcacatcatccagacaagcgtcataacggttggcgataatcgcctagctttgcgctttgaaagcgttcaagtcatttaccactttactaccgaaaaaagtactgccatcctgtaaagtaggttcgtagataatcacctctgcaccttttgcctttacccgcttcatcacaccttgtatggaggattggcggaaattatcgctgttcgacttcatcgtcaggcgataaacgtcgatagtacacttgcgctcctcgttggggctgaaatcgccacggttgtaataattgtaatatccggctttggtcagcacacggtcggcaatgaagtcttttcttgtacggttgctttccacaatcgcctgaatcaggttttcgggcacgtcggcatagtttgccaggagttgcttggtgtccttgggcaggcaataaccgccgtaatcgaagctgggattgttgtaatgcgtgccgatgcgcgggtcgaggcagacgccgttgatgatggcttgggtgtccagccctttcatctcggcataggtgtcaagttcgttgaagtagctgacacgcaaggccaggtaggtgttggcaaagagcttcaccgcttcggcttcggtcagacccatgaagagggtgtcgatgttttcctttatcgccccttcctgcaagagtgcggcaaaggtgcgggcagcttcgtccaaacgggtgttgccttcgggacgtcctacgatgatgcggctgggataaaggttgtcgtacaatgccttgctttcgcgcaggaattcgggcgagaagatgacgttctccgtgtctaatttcctgcgcacactttccgtgtagcccacaggaatggtacttttaatcaccataacggcacaaggattgacgctcttcaccaactcaatgacttcttctacatggctggtgtcgaagtagttcttcaccgggtcgtagttcgtcggtgcggcaatgaccacaaagtctgcgtcggcatatgccttcgctccatctaaggtggcagtcaggttcaattctttttcagtaagatacttctcaatgtatttgtcctgtatgggcgatttacgccgatttatcagttctaccttttcaggaatcacatcaacagccgtcacttgatgatgttatgccagcagtgtggcaatggaaagtcctacgtaaccggttccggctacggctatttttatattcttatccatgattattattttatttgtcttttcatgtgaccaattgtattttctccgtcttttactacaagcatcctctcatgaatttgcactgagaaaccataaaaggccgtttttcccgtattaatgaaagaaactgggaatgacataataaaggtcttgtttacaatataaccgtctaccgctacttctatttcagaactgcctttcatatattctttaattgtcggaagctataaagactgtgaccacggctgttgcaaatgaccagaatttgtggaaaagcagttctgaaaatatctttttcatcattcgatacatattcattattcaagttgataattcattcaccggcattgccatcccattcaatcatctcgatgtcttttccacaagttttattccgtttctttggacaattgcccgtggtgtggggtaggagtatgttactaaacatatgaccatttttactggttatgattcactacaatttttaattcgtcgtgtgaaaccgggcgtttacagcgaatttgtcgcaactgtttaaaatgataaatttacaaacggaactagcgaaccaccctttatggcagcttcactactaccttgtttccggatacctttgttcctgtgacatcgcctttcatgctgatttctatatcagagtattgcggttcaatcatcattgtgccgtcaatggcaatgacaccccactggctgtaattcttctccacggcgcaatacctgcctatgggaggcctgacattgcggtatatcggaggaatggtgatacgctcaccgactttcagcccccatttcatccctgaacggaacggaacagcctcgcccgacttttccagaagttgccgcctcttttccattttctcggattccgccatattccgtatctccctcgcacgctttgccagtcgctccatcgcggccaaacatttctctccctcctctgccgggaagtgacatccgatgtattttttttccccacagtctgtcacatgatagtatttccctccgatgtccgtcacgatgatgcttccatccgccaaccatcggcgtatccaatagtaactgtcatgatcaccaccgaggagacaggcatatccccatggaaaaccagccatatgcggatcgtcaatatagcattggacggaagcattgtaatcaaaaatcgccacatagaacttgtggtcataaatatagccgccgctcaggttcagtttgcttgcatacagattttttgtacggctgtaatacatgcgaccgactttcaacatctccacatccccgaaacgcttcacctcaggtttttccctgtatgaccgcaggttgtaaagatctatataatcagacctgccgttcggtttctgcacggtcaggaaattgtttctcatgaatttcatggactggcaatacccttccttccttataatctcaccacaggcgtttaccagtccgcagttcttgtccgagagcctcaccgctgccatgtcatgccggatatcgaagactgtgacgaataccggggccgtaatcttatttcttccccggcatagcccccataacccgctgttcttgtcgtgccatgctctaagttccggcctcttgcagggattaggagttttttgcaaagctatagcggaaagcagcctgtcatgggaaacgatcatttccataccgaagtcctgacatagatcttccgcggtgacagtttccggacttgttccgtttccatgccggatggtccgtattccccttccagccatatccccacggaacatcgcttcccagtcccatgccatggtgggcagaccgaacacacggtaaagccccacgttgtctatcagcacacatgtttccttaccggttgattttctcagtccgcgcccggcctgttgcagatatttggccagtgagagtgtcgggcgtgccatctgcacgaactccacatcggggcagtcaaatccctcgctgaaaacgtccacatttaccagtacctttattctgcctgtcttgaaatccttcaccatccgtccgcgttcagcagccggtgtgtgactgtctatggctgcggcgtccagtccttttccactgtaatacgccgcgatgttccgcgcatggtcgatactgacggcatagacgatccccttcttcccgtccgcatactccagaacgctccgatacaactgatcgatgcttgtgtgacggttcagtacgtcattcatctcccttacctggtaatcaccatctgcaccgcgtttctccagcgagtctatcaaccgttgctccctgctgtttgcacgtatcgagacataatcaaatgacgacagccaccctttccttataaactccgccacactccatgagcataccagcgagtcgaaaaggtccgtgaacccggtgcgtcccatccggcagggagtagcggtaagtccgagaaattttgcttccggacaccagttccacagcatccggtaagtccttgcctgcgcatgatgcgcctcgtcgatgatgaccagttccggtttttccaccacatcatcgtaatgccgtgttagccattgtatggacatcaccctgacgcacccgtcagtcagacttgtcccgtattttgcaacggtcttttctatctgctccacaagctccctgcggtgtgcgacgatccagaccgtcctctttccatcagtgagaaaactgcttaccaccgccgccaatacatgggtcttgccggtacctgtaggcatctgcaccatcacgctgcggtgcgtccgccattcctccgagagacgctgtataatatcttcctgatagtaatgcagacatacggtttttgccatatcgttttcgattaaagctccgggaacaagcgctctcgttcccggagctccccctgcacttttcacaaaggacaagggttctgatctaacattagtgccggctatgttccatttccggccggcagacggaaataacaggctgcaaaaacaaagttttttaactgctaaattactaaggaccctcatcgagaaggatcgttaagaacagcccgttttactaataggcattcttctcgccacggaagacattcgccaccgtcctgtacatgatgtaaaggtccagaccgaagctccagtgctccaaataccagatatcaccacggatacggccctccatgtcttttagttccttcgtttccccacggaaacccgtaacctggctccatcccgttatacccggtttcacaaaatgccgcaccatatatttattgatcagccttgaatattcctgcgtatggagaagcatgtgaggacgaggccccacgatactcatatcccccaacagcacattgataaactggggcagctcatctatattcgtcttacgcattatattgccccagcgcgtcttgcggggatcatgctccgtggcctgtatcctgtcggcatctgcatttactttcatactgcggaacttgtaacaataaaactccctgccgttcagcccgttccgtttctggcggaagaacagcgggccgggcatggtcaatccggtcactatcgccaccacaatcagaataaccggaaaaagcgtacaaaggaacaccgatgagactactatgtcaaaggttcttttcagcaggcggttccccggccaacttaagggatcggggcgaaggcccaggtaagggacgttccccatgatgttgaacgacatacggtggtggagataattgcgcacattgggcacactgaagaaatgtaccagatggttctcgcagtaatcaatcagagaaacgatgacctctctgtcttttgagggcaggcagcagaacaggtaatgtacataatcatgtttctccagatattcctgtacctgcgccggctggcccaaatacggacattctaccgggaaagcaggattcgcctgaccgtcaaaatagcccacgaccgaataacctgtatcttcactgcccgacatctcatggtagatttccaggttgttgtccgtacttcctaccagtactacaaaacgcgtatgtttcttgctcatacggtaaagcctgatgagaagacgaagagtgaaacggaacgaaacaagacatagaaacaggaggaaaaggtactccagcatgaacagggaggctatatccgcatagtttcctacagaaaggaccagaccgcccaggaggacaaacaggaacatattctcgaacacacgtttccatatctgaagggaatgcactttcctccggtgaagcactactcctgaatggatggcgcaaagggcgtaacataacatcagtgtaagcatgacttgcagaacggtggttccaccaacctgcaggctatcccactgcatctcattggacagcttgctgaaaagcaggaatagcagaccgcaaagaaaggtctcggtgacaatcacaaaggtctcgatcaagtggttgtaggatgctaatttgtctttcataggttgttattatcagatcacattataaaagtgatctcctgttattttttcataccatatccatagccgtaaccatatttgtgcccatatccatagccatacttatgaccatacccatagccactctttcttgaattcaaatcaatgctattaataaccgtagccaatttatcgaatttcttctgatcccgcagcacattaatatactgataccccaacttcggagttacatctgcacgacacacatacacgcacatatcagccacacgactggcaatagcagtatcggtcacaatagcaataggagccgtatcaagaataatgtaatcgtaacgctctttcaatttctctattgcatcttccagcaccgtacgcgccatcaactctgtaggattgggaggaataggaccacccggaagaatatcaagattaggacttacatccgaatgttgtatcatatcaaaaagattggtatgctcggggtcagccagataattggtaataccttccgtgcgatgggacagattaaagaccttgttcagccccggcttgcggatatccaaacccacaataacaactttcttacccatataggccagactgactgccgtatttccagcaataaaagacttgccttcacccggctgtgtggatgtaaaaagcaccactttctgactggcaccaagcatgaacagcatattggtgcgcagaccacgaaaagcctcctccatcataccgttctgattctcctgaaccacaatggcacctttttcgggcttcttacttaaaggaagctcacccaaaataggaacatccgttatcttctccacatcctcggcattctctatcttatattttaataaatccttcaaataaatgaaacctacaggaatacccatacccaatacaagagcagtcagcataacaaccatcttcttaggagaaaccggctttttactaggaagggcagctttgatgatacgtccgttattagcagtggacgccagggttattgcgttttcctcacgcttctgaagcaacataatgtaaagggtcgccttgatttcctgctggcgggagatagtaagaaattctttctcctgctgcggcgcactgctgatcctgccttcaaacttccgtgcctgacgttcaaggttggactgcgctatctgcaaccctctcagtacactgttcacggtagtctgcacattgtgccgcatggactcgatgcccgtattgatattgattaccgcaggattgttttcggaagaggtacggagcaaacgcttgcgttcgatcagcatcgtgttatattggttgatgatagaacccaaattctggtcctgcaaccctacattggcgggaatcacctcgtttgcattcttcgggttgttcacgtagttacgcaaggactccaccagtctcaactgggtggcattctcggtcagctgctgttcatatttcgaactctcctccaaagccagacgggcatcgctggtcaaatcggtcaatccggagcgttgcttgaaatcggcaagttccgtttcggcagtacctaactcccgattgataatgccaatacgctcgtctataaactctgcggatttttgagccacttcattcttctcgtcattcgcgtccagattataaaagtcaaccagacaattgatgaaatcgataccgcgctgctttaccgtattctgcaagctgatggcagcaattgtggtagtcttcgaagtgggttccactgacaaattctctacataactttccgtcacatctgtaggagaattaacgtatgccaccagattcatatcttcttccaaaggtgggaccgagtcgttttttgtaaaactgaaaactcctactggagtggggaaaacagccggaatactgtcaaaacttacctcagtctcctgctcctcctcgtcaagcatatattccacttttacatccaattttccattcatggtgtattttagatgaagcttggctccttcttccagattgtctgcctcttcaggagtcatataaacttttaccggagtggacttatataaaggagtgttatagccgaacatacgttcctcggccactgaaatatacaaattcaaatgattcaccacctttttaatcaaggttcttgacttcaggatttccacctcattgtcaaaattgttagtcatggagaacatacccagatcctgaagggctcccataggattattactgcttccacctttcttgtcaccttctttgatgagtacggccgcatcaacattatagacaggagcttgatagcggagatagatgaaagcagatataatacaaaccagcacactggctacaaaccacggccaataggcaaagtatttaaaaaacaaggcataaagatcaacgttctcctcacgttgctcggtacccgaaggggtgttcttctgttcgtcagtcatatcaacagtttgtaatcaacaattatatttatgagttttatttcaggatggttgccagaaggcttgcaagagataccaaaatggatgtagcactgatccacatgctggtgctgctgccaatgtccgagttcttggcttttgtcttattgggcgttacatagatgatatcgttctggcgcaggtagtaatagggagatacaaccagctctgcattattaagattcaaattgataatctcacgcttgccttttgcatcttcacgaatcagtttcacattgtcacggacgccataaacggtcatatctcccgccatggcaagggcttcaaggatatttaccttttcatttcctacggtaaaagtacccggacggttcacctctcccaataccgaaattttgtaatttgccatacggactgtaacgataggactctctttcagatagggctgcaattgctcacggatcaaatcttccgcctcgtttttcgtaaggccgcctaccttcagacgaccgataacggggaaatctatctcacccttgttatttaccagatattgctggagagtgggttgtgtggtagtattaatattggtcagggctgcattcagaggagtctgtaccgtcaggttaaaaggagcggcagcctgaggatcactcgtgttcacagttatactcagcaaatctttcggcataatctttgcatcataaaggggaagatcttccctgtaactgttcactacctcgggattctgcatgtaaggtacatttttataggaggtgcagcctgccaacaaggcggatgccacaacaaacaataatagtttctttaaagtcttcatatcagttttttcatttattattcaatcatctgccaaacaggcgcgagaaaaggcctctgccgtgattctccgaaacaggagattcaccggcattacgtatcaaatccgaaaaagtggttccgtcatgaatcattccataaatagtaccccaatcgggaaggcctcccaagttgcggtcatctataaaaagatcggctttgagcttgcgtgagtaatgattgttacgccctttctcctcctccggatagtcgcggttcacggcataaaattcaagaccgcgatcacggcaaaaggcaagagcttcgtcaagcagacgcccttcacgcactgtccatagaatcaacctgtgatgttcgtcacgcaattttttcaatgtctcaatggcaaacggcaactccctgccgattgccggatacttgtgctcaacaatagtaccgtcaaagtctactgctatggtcattgtgtgtattattttttgtaaattatataaatcataattgctcaaattactctgtcttatttaaatttaggaagatatgtcattgatgttaattttagtaagattatgcgtcaacaatcatggagataacaagtgagcgtcatattccttgttgccggacatcagctgcttcattgtagttgagacatattcctccacgttaagtcctacattttgcaagtttcaaagagtgcccaaaaagtcaatgccgtttccacacttttctgttagtattaaaccactgtataatatattatattaaataagtaaatatttcacaaaaaacattatcaaatccaattggttttaactatcaacatacggctgcctgaatagaatcgaccgtttcaaataaagaaggagcggaaaaattggaaatgaaagccacaggcagttctgtcagataagttgtatatactcgggatcaacctccactcctacggcaagaaatccttccagttcgacgagcaggcgtttgaccttggagccccgtgtcgtgagcagccttccctcgtatccgctgagcggtccgccctcaatgcggatcttacgcccgtacatggttggggtaatttcttccggcaggtaatacctgggggattcagtggcatccacggcacggatgaaacgttccatgtccgtatcagccaccgtcatcggctcgcgccacgtgccacgcagccagcggtactggagggtaggtatcttttccacgacggcgtcaaggttgttttgtgtttcatgcacgaagagcaagtcctgtatgaagggcacttcctcacggatacgcattcccttgcgggtgaccaagtgccatttcataggaacgaagacctccatcttcatttcttccagcagcttataagcgggtactttggcgtttgcccttttcaagtcgcgcattacgtaccacctcattcctttttcgatccttgtaaatgccgccatttcgcttcaggacatatttatcaatcctgcaagattgtgaatatttctatcaatcaggcagttataaatacaattcgtaaaagttcgggatttctccctgttcttgttccattgcttcattcccgatcagaaatctgcgtctgtttgccattatatctggcggattttcaggtgcgtttgcacctgcttctgttgcacttctcttcgtaagagatgaacaatgcgacatatatgaataaaacagtctgataataaatactttgccttcttttaaaaagcagttcgctcaacaatccgttttgcggttttaaggatcggctcgtgtcccattgttattttttttactcattttgtggttattctcaatatttttcgtaattttgcatccggttattcatctcttacgaagagatcataatttttgcttaacattttatcatccctgaacattcttacatccaagattattccttgaacaagtattccttattcaggaatttttttttcacttctctcgaaaagaaagcgtctgtccgctcgatatgtttgttattccctgcataaggaatttaaaattaatctgtttgccttatcaatggtggcagtgtccaatgtggtcagatagatcctagttgtgttttccgaatcatgtcccatactttcgctgattacggaaatcggaatattcttactccgggccgcactggcccaggaatgacgggcgacgtaatgggtcagggggacagacaagcccagttcttttccgatagctttcaaatatctgttgatacgatgggatgcgttgatatattgctttctctcgtccatgcccggtctggcgataatgggaagaaggtacggggagccgggaatattgtaacggtccacgatctcctgcatgcacggctcccattttacaaaaagttgttgaccggtttttttccgccggtatgagaggatgccgttgttgagatccttctttttcaggaacaccatatcgatcatggacatcccccttgtgtaaaaactgagaagcagcatgtcccttgcaaacctcttggccggatgaagtgacaggtccaatgtcatgagctgttttatcgcacgcaggggaacggcccgcttcgtcgttctctcgactcccgtatagacatgtctgaaggggaaacgctggataacgagttctttctccacggcacggttatataccgcccgcaggttgcgcatgtaaaaagagatggtattcatggaaaccccgcctgatttcagccacgcctcgtatgcgatcatcaggtcggaatccatatcacagggcggtatgtcccttccctccatgaaacgcatgaaactgttaagggtagaggtgtaggtctcgcttgtccgtatcttgcccaggcgtttcagaccgttggtgacatcccgcataaatacggaaaaagacagcccgcaatgtccatcgtaaaaggcagaggttacatcatcggcggtgaaagtacctcccttccgttccagagctgtgatgacattctccagacggtcggtatcttccgctatttttttatccaatagcaatagatattgtcgtctgtcctcatcggatgacgcgatgacaatccgggaatgccgcttgctccattcggcaggaaacagcttgcaagaggtgttgatctgccttgccacacgtccgtgaatcacttgataataaaccgtaccctctctgccatccacagaagaaggtctgaatttaatttttactgtagccataaactctctgatttaaaattatacagaatgcaaaattatcaaaaggtggtagcccgtcttttgctggcgagccatgcggttatgtaccatccggtaaaataccgttccttgtcagccatcggctgccgacgatcggaatttgactttcacccttgccatatcatctccgcctttttgaatttctgcccctgatcgagtcggccttgtttcccagctcccttgccgcatgctcctttaaccgtgcctgctcgataagggcggcccgctcgtgtaccgcttcctcgtaggcttccacatccttgcgcatttggtttatcttgccgttgtcacggttgaatccgaaaatattttccagtccggagatattttcaggcgatgcttcgcccttcatcctgatgtagcggtacttcaggtcgttgtcggcacggtcgtagtccggctgtctggccgcatggagggcgactgccaggacggtgaccatcgcgaacatcccggtgaaagtccagagtatacctttggactcgatgctgacagtatggcggtgctcgttgcggatccttgcattgtcaccggttgtcttcagcagggccttgatctcctccgaggtctgctccccggtttttcttatcccggccaggatttcagcggttctgtccggcaacgggttcctgccggacacgtcctgcatgcttttgctgacggcgaggagtgttccggcatattggctgaacgatgtccggattccgttcaaatcccgttcaagcccgtccctgatttcccgtaacatggcaattccggtctcaccgcccgttaccgccttgtttttatccgccggggcggatgacaatatctccactttcttctcgatcctttcaagacatccgtagatgccttccagatagttttcctctttcatctttcaaggttttttcgttatacatactagtttacaaactccttcctttcctgcgcttcttctttctccgcaggcgttccgcctctttctcgtcctccgtcggtgccaccgacggcatgaacacgccacccgtaccggtgacttcgaccaggttatcaataacagaaccatgactttgttcatggtacggttgctttcgggaaacgtcattttccaggaacgtgacatggttacggtccaatgccacatccagccttgaccagctgaaactgcggtcaatcccacttcccttgaatgacagaccgtccttgataaagcggatgccctgcacttcattagtgtttcccttgtacttgaattccatttccacgcccatttttaagagcttattttgaaattctttccatgtatctgcactcctcaaagcttccttaaccgcacgatatatctcgtatttcaccttttcggaagcgtgcagcttttccgttttaacggactgtttgccttcggaataggtgagcgaatacttgtctttaagcatttttgtcactttctcgttgcgcctgaaatcgttgctgtcggaaatcactttcccgtcgaagtccacccggttgaagacgatgtggcagtgcgggttgtccgtcccgtgatgcctcaccacgatgaactgcgtgtttcgtatcccaatcagctccaggtattcctccgccagacttgccataaaggcatcggtcagcctcggtgcgtcctccggcttgaagctgagcgcgatgtgtcccaccggtttcgtcacgtctggattcagcaggcattgccaccggaaacttcgcgccatctcttctgccgttcctagcagcacaccttccgaggcgatgatttttgcgtcgtccttctgcgtcacgtagcgtatgcagccgccgaacgagcggcctttcctgatcttccctatcatgaggctatcctcctttaggtctgtaatcatccatgatccgcttcagcttttccagcagcccgcctatcagcagccttgtcctgtaaaagcctgcctggtgcgagagctttgtcagccggttcaggttgttcgccattcccgccaggctgcgcagcagcgcgttctcctccggtgtatgccttgccgtaacggtggccgccagtgccgcctccctgatatagaccgccagactccggccggacttccctgccctgaacctgagagtctcgtagctgacgggggagaacttcaccgtcacgcctttggtcagcttccgcgtcctgcccagtgccggacggccgcgttttttcttcatcccattcatatcctttgtcatatgttttttctttttcgtccgtacttctttcattccaaaatctgcgaccggcgggagcggatttgccctccctgcaaccgccgggagcggggagcaagggttttcgggaatccggaaacatacccttgctccccccacagaaaaatccccccgcattttccacattgaagcgggtacacaggggacggtgcatacatcgggtacactccacgcccggttacaggctgtcagatttttctccactgctcgatgtccccacggtaggcggcaagatgctccctggcaaggttctccagcagtccggaaacgctcatgccacgcccgccgagcctgcggacgacggcgtccagttcgtccctcacatcctcactgacgaacaccgtcttgcggttcctgatcttcgggacggtgaggtatgtttcccggtactcctccagcgaggccctgcgctgcctgccgctcgtccttcttctcacggggtcttccggttccggcggggtgtcctttcttcccgcctccccgaacacctcctccgtatcagtcccggatggaatcaccggttccgtatccataccggtggattcccccggaccgggttccatcatgagtctttcccaccacccgtcgtggccggggctaggactacgaccgttctttctgtctgtggtttcggatgccgccgttttctttcctcttggtttttcagtcggttcacttttcattgtacatggattttagatggttgatactgtgggcacggtctacccgtttgcccggttgtcggaagcaaataaaacgataataacaagtgctgtgaaacggacgggtccgattggcggggtttgccgtgttattcatattgttggatcagtctgacggtgatgacttcacaaatatacgcaccggaaatttcccactcttcgggaacggatctgaacgtctgtctgctgaaaacaaatgaatgttaaaatccgatttccatgacatctgatgacatataatgacatctgatgaagggccggaaccatatccggggacaatcatttactttgcggatgaaacaagtacgcatatggtgtcaaaggtagtcatcctgtcttgaaatccaggatgttccgccgggattcactaaattgcggcacggaatccggatccgaaaagagaatgaaacagatgtcaaacctgaaattacattgattatggaaatagtgaacattgaggcaaggaccttcgaggcgatgctctcggccttccggacgttcgcggaccggctggacaccctctgccggctgtacggtgacatggaagagaagaaatggctggacaaccaggaggtgtgcctgctgctgaaggtcagcccgagaaccctgcagaccctgcgtgacaacggcacgctggcatatacacagatctgccataagacttattacaagcccggggacgtggaaagcatcatccggatagtggaggagcgccgcaagcgggctgaaaatatgggaaggtcgatctgaaaggccatgaaaaacgaatgtcgaacaaaaaaagatcaagtcatgatgaataccgataaccgtctgctcacccgtgagagcagcgagcatataagagagttcttctccaccgtcgaacgtctctccgtttccatggagcgtctctttgccggcaggtcaccggcgatggcgggcgagaacttctatacggaccgcgaactggctgaaaagctgaaagtgagccgccgcagcctgcaacagtaccgtgacagcggcctgcttgccttcacccggctgggcggcaagatattgtaccgttcttccgacatcgagaagctgcttgacagctgctaccgggaggcgagaaccaggccggaggaactttaggaaagttccgtatgggatcatgaatgaaggaggtgtgtcacaccttcttcattcatgcacaaagccctgactttcacaaacaaaggcttgttattacctaagatttcgtatctttaagaataaagattcatacagaatcacaggctcaggaaatacaggcggaaagcaaaagagtcactatgttccgaagaaggattaaaacactgaggacaaagatgcataaatctataatatgaactacaaactgtgtggaaaagaaatctaccgcaaggatttttgtgagatatttggaaaaatgtaccaatgcctatagataatatttatagaaagatggataatttctataaaaaagttgtctaaaaacacatatttcacaacaggtgtttttagacaaatctttgttgttaattaacctaaatcagctatatacacagtcagtattttatattgtcagaatcaatttattctgtccaagcatgacgatatccttgtattttattccaataaccacgagtaaaatcaggaacagctacaggaacatttccgttttctattgaaatccgggtaagctcagccatgcagcaccattctgccaaatcatatacgtccatatccaacggtaatccattacgcaggcaatataccagacggtaatccattatataatccattccaccgtgcccgcctaccttcttggcagcttcttccaattcctgatggataggatgtttatattttctcatcaaggattctttcaccgtattggaaacagccgtatgcatattgagattctcatggtcaggcatatcaacggtccggatttggtcggggcggaagcagtactcctcaatgggatatttgttggcatatccattggtacctgtcaattgatacatgcggctgtaagggcgtggattcattacatcatgttgaatatgaatcgtttttcccttttcggtacggataaaggtcatggtatggtcaccgttttggaaatccggtgcgctttctttctggtattgttttactaatttcggaccggttacagctttggtatccattgccaccaacgttttcatacggtcaccacggtgaatgtcaagtaactgacaggccggtcccatgccatgggtggcataaatatcaccacggaaagcacggttatagtccaaccgccagttgttccaatagtaaggccaaaactcttccaaattgtggatataagcgccttcaacatgcagaatttcaccaaacaagccttgttgtgccatattcaatgtggtcaattcaaaaaagtcatatacgcaattctctaattgcatacaatgcttacgtgtcttttcggatgtatttatcagtgcccatatttcgttcagtgtcatggctgcaggaacttcaatggctacatgtttgccatgttccatggcgtagacacccatttcggcatgatgtttccagtccgttacaacataaacaaggtcaatgtcgtcacggttgcataattgtttccaagcatcttccgcacctgagtaagtcgcagcttccggcataccggaactgaccagcgtcttttgtgccttttccaccagttcaggacgcaaatcgcacaacgctttgatttgtacacccgggatgtgggtccaacgctccacggcactgatgccacgcatgcccaccccaataaaacctacacggaccgtgtcaattttaggtgctgtcagtccaaccgcatcctgttgcccggcaggacgttcgggtacgactatctgaatgggttcataaggctgttcacaagttttagggactgacgtacaaccagtaaagcataataaagccgtcgctattgaaaataatgttttacgcatactcatgtattatgttagtattttaatatttaaggaagagatgagatggacagcgcagccgtttccaccccatcaaatcttcccgattcttcaattatttgttcaggaaattattcttgtaagaaatacgctgtaatagtccatacctttttacttccatcggcagcggtgatttcatatttgttgggtttgctccagtcccccggtttacccagtacggctgctccgtctatgggttgaatcatggctgctgtagaaatattaagtgaaaccactacatttgacatcgtgaatttaggtctttcttcagccgggaaattgctgggaagcttgcattcaaaagaacttgttcctgtttctgcatccgcctgaaaattatcataactcaaggccgattgcagaacttgttgttcaccactgccgggaatggtttgagaaccataataacgatgataaacaccggctatgccgatgatatctttgcctttatatgtatccagatcttcgagattgctatccaggcaagatgttgtaaatacagtcaaaagcaagattgtaataatattaaatatttttttcatattcattgtctataaattaatggattaccagcctttattttgtacatgatccaaaccataagcctcacgggtattcagaaaactttggttaattggcaaaagatagcgtttttctgtaaatttacgctgggcgctattgttcagggtcatttgaccaaccagcaacttgctccggtcccggctgatggacatcttgtataccggccggtcaaggtcataaatgatatctccggcatcacgaccatgattggcataaccgccatatttcccccaacgcagataactgtaataaatgtcaccgccctcattagtcagctcacagtttcgttcacgaatataatccgcccacgcttcttcttctgtagcggcagtagactcgctcaatccgccatgtatggtacgtgtcatgttcaatgctttcaccgcattgggcacatcatgtttcagcagataggcttcagcaaggttcatataggcctctcccaatcgaacgatattgaaatgcaatgccacctggcaattatggtaagctctgggtgtagggttttcaatgttgcctttacgccaataataaccggtagtggtattgtaccagcctccatcttccttgtcacggacacctgctgagaggtttccacccaaattgagctcaacagtctcaccaatccaggagcatttgtcataaactatggcagtatagaaacggcggtcacgcccgctgtacatcagttcgctcaaatcccggtcagcccccttgtttaactgatggtaacgggtaaaagtgggatagcttttgttaagctggtttaaatcttgtggcgtaggaatacggcgtgcatcaccatttacttgcttgtatgcatccacctgacctgcttcagtaatactggaagggtcaagtacggttacgttatttttatattgggaagtttcataccaaggcattgccttaccggtttcctcatcggtcacaagaaactggtcaaccaggtcttgtgtgggaaagtaaatggcccagccttcgaatgtctgcccatttgcctgttttaatgctaccggcgattgggaattgatcacgttatcggttgaaacattcggataagtacgcatcagttcttcaaaactggagacatacgtattttctttttcacggtaatatccccagagaatttccggattatataaatccgtttcgttgaaaagaccgtttgaattgcttaactcaaccccactattgctgatcacatcattggcagctgtaatagccacgtctagataagaggcatcaccggtataggcataggcttgcagggcggctcggctcagtaaaactcccgccgcccaacgtgttggcaaaccagaagcattctcgatcggcaggtcgtttgccgcaatttgcaaatcttctatgattaacttgtagctttccgatacatcctcggtcatcggaatattgacagcctcaggattctcaactgtaaagacttcttttacaggaacaaaacgtcccatcttacgtgcctggtcaaagaaaatcataccacgcatcaagtttccatgtgcctttagctctatcttttctgtttcgtttaaggtagagctgttttgcacattggtaataatcatattgactttacgcaacaagccaaaacggttgactccccaatcattgcctgtgctcaatcccaattctgtggctacgttgtcaataccctcgccaacctgtgagcagagcacaccgttgggagttcttgcttcccaggaaatgctggatccactgccggcatatccgctattaattactgcatcataggtggagttgataaaaccttccacggtggctttgctgccccatacggtctcatcatcaaaacttgttgtcgggcgtgtatccagcgtgtcgatgcaagagttcagtatcataaggctgatacccaatattccatatttatatatatttctcatcatacaattatttaaaatcctaaatttaaagtcaatgctatggttctttcaaccggataaccgtaatagttggtatcggacggttccggatccattccatatttggtcgcttgcgaaatggtaaaaatattctgaccggatatgcccatcttacaacgggtcagccaagagacatttttcagcaggctgtatttaaaatcatagccgaactgaaagtccttcatacgcaggtaagcaccgttaatcagccaaaagtcactgcttgcgtagttgttattctgattcaaggctgtatttgccatcagacgcgggtattgtgcgtcacggttatccggagtccaaaagtctgtttgataatcgtaagccactggcatgccggaggtctggccggtctgcatacccaaactacctgcaacatacatattaaatttggtagatccttggaacagggcactcagataaaagcccttataactcatatttaaattgatgccgaattgtccacgcggcttgcctgattttcccaaacggcgtttgtccgcatcagtaatctgaccgtcgccattcgtatcctgatactttatatcgccagctgtaagataaccagaattcaaggcaccggtaaaacctaccgaattgtaaacgtcctcagcacttatgtaatatcctaagttatgatacagcagaccgtaatatcctttattctgctgagtccgttgatatggattcatcacggatgactcaccttcactttcatccagggccatcagttcatcaaagtaggtgagattggctgacacatcgtacttaaagtcaccgatatcatctctccagcccagttgaagttcaaatccggcacgacggtgttcactatccgattttaccctgggcagccctacgcccaaggcggtattgagataactgtcaccacgcggagccaccaaatagccctttgtcgagtagtaaaaataatcaaatgagccataaaggcggttgttcaaggaagcaaagtcaaaaccgaagtccatctgtctggtggtataccatgtcaagtccggagaagccaagtctccttctgtaaatccgggagtatattttccgttaacaacataggcataaggattataactataggtggtcatatattggaaacggcccgcagactcatccagaccggtttcaccataagagaggcggagcttcaatgagttcaggatatttttttctaccagtggttgcatgaagccttcctccgtcaccacccatcctaacgatccgctgaaaaaagcgccccagcggttgccgggtgcaaacctgtcagaaccatcataacgtatgcttccttccgcgtaatatttattggcataattatatttcacctgcccgatccaagcagcgcgtcccagttcggcttcactaccgccattggtttgggaattggcatcaccaacctcaatctgatctatgtcaaatgtatagttggtacgcttcccccaataactgtcaccccattcatagtattgctcaaaacctgccaaagccgacaatgaatgtttgccgaacagattggcatactctataaatgcctgattggtgaatgaatagcctgacccgttagtcacactaagttcgggtttgttggcataagtggcttcttgtgaatcccaatcatattgggcggcatctttacgccaacttttattcttggaaccgtaatagcgataattgctggctgcacgtaccttcagaccttccacccaaggcacttcccagactacttcgccacgaccgttgatcacattgtcaacattacggttataaccagcatctttggctgtttccgccactggattatcagtcaggttatagggaagtccatacttgttgacacccggataagtggagggtcggttgtttatgtgtgagaaaaccgcataataattgctcgccgtggaggtattgggatgggtggtcttttgccaataaccgtcaatggttgcattaatgcgcagaccgatggactcaatgaacgaagactgtgccaaacggaaattcgtgcgtttcatccagtggttgtcgtttttataaagcgaattctggtcgatatgtcccaaagaaacataatactggttgtcttgtgatcctccggttacacgtatcgaatgcttactttgtggagcccagtcattcaacactaatttacgccagtcagtattggcaaagttcaacggatcgctaccggtgcgaaaagcctccaacgcttcttcactgtacataggttcggcaccatcattggcacgggcaatgttggcatagacagcacggtcataagaccccattttttccggccagatagatggctgtgaaaaactcatgttgaaatcgtattcaactgtgggcttgccttcctttccacgcttggtagtcacctgaataataccgttggtagcccgtgaaccgtaaactgccgttgccgaggcgtccttcaatattgacattgcctcaatatcatccggacttaaattttggaagtcggcagcagagcggataaccccgtcaatcacatagatgggagctcctcctccacggatactgatgctgggagttgaattgataccacctccgctggcttgcacaatcaagccgggggcacgccctgccagaccttgtgcaatgttggtaacaggaatatttgccatctggtcagtctttaccgttgatacagaggcaatcaagtcacgtttggtagtactgccataacctacaactaccacttcatccaaagttttggaatcttctttcaaaatgatttttaaaggttttccattccacacaacttccacatttacataacctacatatgaggcaacaataatatcacctttttttacattaggaatactaaagtcaccatccagtccggttatagttccgttggttgtacctttgacaaccaatgatgcaccaataacggtctcaccgttttgatccaccacgatgcctgtgcatacattattctgttgcgcagaatacatgcccgtagttgctgcataaggtgcggcttgaagatatccggtagaaaatccagataaaagcaacatcacgcttatcagctttagttgattttttttcatagatttaatattaaaaatgtatttgaaacaatttggttttgattggtgaattgtagaaatggtttttaaatagtttttgtcatagattaaatatttaagttaatatgttaacaaattagttttttaaaaaaggttattttgatatttatatgcaaatatataaatacatttaataaaaaagttattttcctgcatttttttggaaatattttttagcaagagtcaaattgtttaaccttaattccgcaacactattacaaatataactttttaagtacctgagcaacaaaaagttgctcaggaatttgccatgtcagatttttcacctatcttagtgttgcaaatcaaaatatgtatcaaacccgacagacatggcaaaggtagcaattaaatccgagaaactcactccttttggaggaatattttcaataatggagcaatttgactccagactctcatctgtaatcgactcaaccctcggtatgagatgcaggctgtatggttatcaatacagcgaaatcatccgttcgcttatgagcgtttatttttgtggcggctcatgcatcgaggatgtcaccactcatctgatgtaccacctttcgcttcatccgacacttcgcacatgcagtgccgacacgattcttagagccataaaggaactgacccaggataacatttcctacacatccgacactggcaagacctacgacttcaacacggcagacaagctgaatacactgctcctcaattgcctattgtccacagggcagctgaaagagggcgaggggtatgacgttgacttcgaccaccagttcatagaggctgagaagtttgatgcgaagcctacatacaagaagttccttggttatcgccctggcgtggcggttattggcaacttgattgtcggcattgagaacagcgacggcaacacaaatgtccgtttccaccagaaggacacgctgaagaggttctttgaaaggtttgaacaaaacaagcttattatcaaccgtttcagagctgattgcggctcgtgttctgaagagatagtggaagagattgctaaacactgcaagaccttctatatccgtgctaaccgatgcagttcgctctacaatgacatctttgccctcagaggttggaagaaagtggaattgggcggcattgagtttgagctggcctccattctcatcgagaaatggaaagggaaggcataccgtcttgtgattcaaagacagaagcggatagacggcgaactcgacctgtgggaaggagaatacacctaccgctgcatccttacaaatgactacgagtcttccgagaaagagattgtcgaattctataacctccgtggagggaaggaacgcatcttcgatgatatgaataacggattcggctggaacaggcttccaaaatcctttatgggagaaaacacggtgtttcttctgcttatggcactcatacgcaacttctataaattcatcatggcgaggcttgacgtgaagaggttcggactcaaagcaacaagccgcatcaagacgtttgtctttaagttcatctctgtgccagccaaatgggtcaggacatcaaggaagtatgtgctgaatatctattcatgcaacaatgcttatgccaatgtgttccagaatgactttggataacaccgacaacttatagtcgtgattttgcgtattgcctcaagtcgcatggtggggtaaggggcatttatatgtctttatggtgacattcgatgcactgtgccccctttttactaacgatgcagattcttttcgcttctgtatcatattaggcgcgtagttgcggatttgaggtttaagattttaatgaggtatgtttttctgttatataagtttccaatataatttttcataaagagttgccaccttgcaacgactaaatactaagaatgcaatgttgcttattaggacaggaatgacatggaagcagacattatttgttcagtgctggttatgagatgtttaagcggaaggaatacttgctttttatcattggcaaatgtatatttggctgtgtgtgggctgacgtggacattgcagccggcctttttcgcctgtgcgtttcaggctgctttctatgttccccacatcccctacgggaaatagggacagcagtaaaaatatgatagagagaacagctgtggccttgttttttttgcctattccattttttatgattcccttatatcaatcccagtgtgttgccatatggaatattatggcaatagggaacagcacactgcccaaaacatgaaacatagccaaattatgccagatttcatggctgttcccacgcccagtcacatgcggtctaaatccagatatgacagacgcgatgaataaatctatcaaaatccaatcaattacaaaagttcttttcatacgcttccaattttattatattgcaaagggcactacttttattctcaaggcctttattccattatgtcattatgaaattggggcgggctgtccgtgtatcgatagaacggtccgttcccgtaatggcggcgcataaaaacaggcacaccctccgggctcctgtcccgtcggatgcgcctgtttccgtcatgtcatatacagccggactcctccggcccatgcctttatctgagtatcgggttcgagagcagtatcttgtaataggacaccccgccaatctccaccggcattctcgccatcatgaactgcacgctcttcctctccacctttgcctgtcgcatgagcctctgcacgataaacccggctgagaaccttgcgcatcttttgtccttccagacgatgaacccctcgctgtcgtcggcccggcagatataccagtcacctgtctcgtcgtcgtgggcgaagttcacccgtccgccgccgaggattcctaattcgattgacatcgtctttgacagataggcagtccccctgctgtcaaggttgatggtccgcttacccttgtatgtgacttcctgcggacgggagttttccctgttgtatactatcagtgccataattgtccttcttttatcggttgaactgttttcgtttttcaatacatgaagctttctaccgccagcatccggcttctccatgcgaaaccgctgtggatacgtactgcgtccactatcctgtatactttctgcgatatggccgatgccgagatacccatgcattccgccagcgccttgaacgagaactgcgcttcatagaacctgagcatgaacatccggtattcctcgtaggagaacttctgccttacgaaacgcagtatgtctctcaccagccgctcgcacccgttcaggtcgtcctcggaaaggaattttgcctcctcgccacatcggaggaagaaatcatcttcagggtgtgcatatcggttctcccttttaatctttaccagggccgcctttttgtagcatccgatgaaatacgcctcatagtccgttatgtcctttccgggaaccagcacctgccttcttacgaaaaggtaggtgtcatggaaattgtcctcgtccagcattccgtaccggcgtaacgttcctctcaacctgtcataggattttgtgaaccactcgttgaacagtctttccttttctgcgctcttgtctgccatagccttatatttttttgagtcgttatacatggcctacacgggtaggcattcttatttcttgtgcttcctccagtttgtttttcggcggtctccggcaaggcttgccgtgaaaaaatacgctcacgcaaagcgtgaggaagattttttcacgagcaaccagcccgcagggccgccttgcgggaccggcctgaaaaacaactatttttgccgcaagaaatgaggatgacggattccttctgtctattgcctgtccggtgaacatgtagttataattgataatcaaaaacttatattttaaacggtagaaaagtattttttagaccataatgggttgtttttgaacctgaatttactgtttctacgtttattcttctacataaaattagaaccgttgaaaatctagattttccaactgaagtccaccagttttctatctacttacaaaggtacaaataatacgtgagtttttcgccaagtatgtcaactaaatgcaagagagttttacatatattgttttactgaataaagggaaaaataaaactaattctttcccctctatttgactttactttaattgacgtatatttgaatacgaagtaaagtaaaggcgaattgctaaaatgttaacattcagtaataagaaaaaaaataaaattgttttttgataataaaaacaatcattatctttgtgtgtaattcaatttaatgatagtcatgaaagatatcaatcgactgaaaattgtacttgttgaaaaaaaaaaaacagggagatggctagcagagcaattagggaaagatccatctacagtgtctaagtggtgtaccaatgtatctcaacctgatttaataacactttcaagaattgcggaactgttgaatattgacagacgtgatttgataaataaaagtaaataagaagttatggctaagaaaaaagaagtaatagacgaaccattggaaaaacagctttggaaagcagcagacaaattacgcaagaatatagatgctgccgaatataagcatgtggtactgggacttatctttttacgatatatatctgtttcatttgaagatttatataataaactcaagcaggaaatagaccttggggctgatccggaggatcgtgaggaatacaaggcagaaaatgtgttttatgttccagcggaagctcgctggagtacgctggtagccaatgctaaagaccctaaaatcggaaagctgattgacgaggctatggatgcgattgaaaaggataacccttccttgaaaggtgtattgccaaaagtgtttgcccgtcctaatttagacccgaccagcttaggagaacttgtcgacctgataggtaacagtacattgaatgctgcgactaacagtgctgaccttttaggacatgtgtttgaatatttcttaggtgaatttgccttggcagaagggaaaaaaggaggacagttctatactccacgtagtgtggtggaattgcttgtgaatatgctggagccctacaaaggacgtgtgcttgacccttgttgcggatcaggtggtatgttcgtgcaaagcgagaagtttgtggagcagcatcaagggcgcgtaaatgatatatccatcttcggtcaggaaagcaatcagactacctggcgactctgcaaaatgaatctggccattcgtggcattgatgcttctcaggtaaaatggaataccgagggctctttcctgaatgatgctcaccgtgatgtgaaggtagactacgtgatagctaatcctccgtttaacgacagtgactggagcggtgaccttctgcgtagtgatggccgctggaagtatggtgttcccccaacaggaaatgccaatttcgcttggatacaacattttatttatcatcttgctccggcaggacaggcaggctttgttttggcaaaaggagcattgacttcaaaaagcagtggagagggtgaaatacgaaagaatcttgtagatgcaggcttaattgactgtattgtaaaccttccagccaaattattcttgaatacacagatacctgcttccctttggtttttgagcagaaaccgtcatgctgatggctcatttcgtgaacgtagacaggagattctgtttatagatgcccgtaatatgggacatcttatcaaccgtcgtacccgtgagttctcgccggaagacatcaaacagatttccgatacttatcatcaatggcgaaacgaaggtggaacttatcaggatgtacccggcttttgtgcatcagttcctgtgtcacgtgttgctgaattggattatgtgttaaccccaggccgttatgtcggtttgccggaagaggaagacgatttcaactttgaagaacgatttactgcactgaaagcggagtttgaagcacagttgaaagaagaggaacgactgaataaacttatattggagaatctggctaaaatacaatgagtatggaggatatgaatagacaaagtgaaaattttgaaggtaatgaatcttctgaatttatgatgaaatcatttaatcctaatgatataaatgtagatattatgactataaatttaggttccttaatagaacaattagaatttgaggagatagatctacaacctgattttcaacgtgctacagatgtttgggataatataagaaaaagtcgtttgatagagtctattttacttggtcttccattaccctctttctattttagcgaggatccttttacattgaaactatccattattgatggtttacaaagaatctgtgccataaaagattttgtattgcggaaggaaaatccattaaaattaaagggcttacaatttttaagtcattttgaagggaaaacttattcgcaattaccaataccggagatgagacgtataaaatcgttaaaaataactgtaaatgtattgcgtaaaggtacaccattgaatgttaaatacataatctatgaacgtatcaatacaggcggaattcctctgaatcaacaggaaatacgctatgctttgaatcaaggatttgctacagtctttttgaaagaattagctaatatggagtcttttaaaatagcaacagattattcgattaatagtaaaagaatgcaagatttggactttataaatcgttttatagcattttttataggatatactgaatattccgggaatcttaatttgtttttatttgagaaaatgagagaaatcaatatgatgagttctaaccaaatagattatatacgaacatcatttgataaatcaatgaaatgttgttatcaaatattcaaagaggatactttccggataaagtatgaagttacagatagaagaagacctgtatctaaatccgtatttgatactttaagtgtaaatgtagctttgttgaatgataatgaacgaattttgctcttaaatagagcagaagtttttaaaaataagataattggtttgtttaataatgaagaatttaaaacttcaataacatctagaactacacaaagacataatgtaatgttacgtttttatatggtaaaatcattaataaaagaaataataagcctatgataacccatttgagcataaataatttaaagcttcatgaccatacagatctggaactaaacggactgacaatccttacaggtatgaacggtatgggaaaatccacggtaatacagtcgctaatattgttgcgtcagtcttttatgatgaatgatctggattcaggtttgaacctgaaaggtgatttgtgcgacgcaggaatatcaggagaattggcttgtcaggcttcaacagaacatactttgcagataaacatgaagtttgcagagcaagacgatttgaattttgcatttgaatatcctgataatattatggatacgatgttgccgggagtaaaagggaatgaaacatctaaggctgtattgtcaaaatattcactgtttaatgagaaattccaatacctaagtgctttccgttccggtcctcaaaagatatacaatcgggatacgtcattggtggtaaccaagaagcagatttctaaaatcatggggcagtgcgaatacgcagtgcatttccttgagcaatacaagaatgtcaatatacctgtaaaagaacttgctatcatagatgaagaagatatcactcccgattatcggcttgcagtacaggtagaacgttggttgcgtttggtttcacctaatatcaaaatcaatattgagcctgcaggagaagattttaaattaaaatataagttcaaccgtgaggaaaataccattacggaagatataacagccctgaatacgggcttcggtattacttatgtattacctatactgatagcagttttaagtgcggataaagacgccattatcttgattgaaaatccggaagcacatttgcatcccaaaggacaggcggtgttgatggaacttgtttcaaaggctgtggctcatggagtacaaattattattgagtcacatagtgaccacataataaacggtagccttgtggccgtaaacaagaaatggattactcctgacctactttccatatactatttcgaaagggaagagcatggacatacagctttgtcacatcatttgcagatttcggaaaccgggcgtattactcgtcctcctaaaggtttttttgatcagatagatatagatttaagaacattaaccggattctgatatggagcacagtgaattatttctattgctgccaagatatgaggaagctgaaggacaacctgactatattaggctaaaaagtgtcatgacagtggctgaaatcttagaagtgatagaaagtattgacgagatatgcagatttatagcaaatgagaattacaagggctattatgatgcagacaatgtatcggcatttttatatcctgtagaagcgatggaagaatgttatccaaatatcaagactcgtatgcgtatggttatgagtaaatggggagagaactggcggactcagaaagttcaaaaggatactgtgaaatatatgtattattgtattccgataaaggatgatacattgtgtgagatgacagaacgaaaatttgtttctacagatgagagtacgtttcttttgattaattatgatgcattttcgtgcgcttctgaaacaataattacaaagcgtaatcaggacgaagtggaattgaatgtgagaaatgctgatataaaaaatatttcgaaatggtatgaaacaaaccgcaaaccacagaggatattcaatcttaatccaaagcatggtgaaaatggaaagggtgcacatcctggtaataagggagaaaaagtatctgtattgatgtgtagcagaggtgaagcaaagaatatgcttctgaaagctataggttcagattcaaaggtattatatttttttgataaaacacacaatcagtatattgagtttaaatacgaaagtaaaaatacttatcatggatttcatcttgatgcaatagatgaaaaaagagtaccggaagaaattaaggatatgataaaaaagctgatgtcatgattttaaatcatacagaaaaggaatttataagtgccataacaacttatgaaggtaaggcaaaatcgctggcagaagtgcttaataaaagcaagttgttggagaggagaggtattggcatcgtacaatatggaggaaagaatattatttttctgaggaaggatttatatgatgattggtttcataatgatggtttgggttatgtagtagaactgctttctctgattgatactttaattaagaagaaatatatcattatgatacctttttgtacagacaatgttttagtgattggtactgaagattctcgatggcttagacctgaacttatctctgtgcatgaaaatgaattcattacgcttgtagatagaatggaaaattggctcgacgcattaggtaaccagttatattggccttgtaaatatacagagaaagagctttcaataggaaatttatttcattgtgccttttctgtaagtgaagagttgaaagaattagtgaagaataattttatgtcagaagacgaaattcgttttagaaaacaacaatatatgacttggatctctatcattgtagctacattgattggaatccttggagtaatactttaacagtttgagtatgggtgaatggaaagaatataaattaggagatttaatagtcggtaataaaggttgctatgggattgcagcgcctgcggtagattatgatagaaataaatatacttatttgcgaataacagatattaatgatgatggtactatcaataaaagtaatttaaagtctgttgatgataaaaatgctgacaattatatattgtatcctaatgatatagtatttgcgagaacaggagcaagtgttggacgtagttatttttatgaagagaaagatggtgttttagtatatgctggatttcttataaaatttagtattgactctaaaaaagtaaatcctaaaatattaaaatattacacacattctcaaccatattatgactggattcaaactgttgacaatggggctacgagaggtaatattaatgctcaaatctatgcatcaatgccagttttattaccggaacggaaggaacaggataaaattgtatctattctcagttctttagacgataaaatagatttgctttatcgagaaaataaaactcttgaagctatggcagaaacattgtttaataaaactttatctgaaaaagaaaataatggaacaatagagcaacttatttctattcaaaatgggtatgcttttaaaagcaaagattttcaagaacgaggtgtaaatggtgttattaaaataaaaaatatatctggaggagtaattgatataaataaaacagatggtgtaggtaatgatataattcaaggaatatcgtctaaatttaaagttcacacaggtgatattctaattgcaatgactggagctgaaattggtaaactaggaataataccttctacaaataaagatttatggcttaatcaacgagtaggtatgttagtggaaagatatcctggagctaaatacattgcttatttacaattaagaagtgattatggattagattatgttgaaaatactgcaacaggaagtgctcagcctaatataagtagtagtgctattgagaactgtggttttcctttattagatgtttctgaaataaaagccttagcttatcaattagagggattatatgaaaagattattcataatctaggtcacattaatggattaaaactattaagaaatgagttgttgttgaaattgatgaattctcaggtatgaataaattgaaagaaaaaatctcacaatatggaagatggcatcctttgcaggtttacatatcaaggattgaagttcatttagatgatgatttttctattagcatagaaaatgcaaaggctctgcttgagtcaataggaaaagaaatctgtaaatctaaaggccttacattgaaatctgattctagtgtgaatggagtattaaaaaatgcatttgcggctttaggatatccgaaagatgagatgattgctcaaatatcatcttctttagctaatattggtcagcatattggtgctttacgaaatacaatcggaagttcttctcatggtaaatcattggaggaacttcaaaaaaggaatgagaaaataaatgacatgacaaaatattttcttatagattcaatagagttgatagcttgccttttaatagaattatttgaaggtgaaaatattcaaatagaatcattatcagatttagtttatgaagattgtgatgattttaatgagtattgggatgatatatatggtgagttctctatgggagattattcttatactgcaagtgaaatactttataataatgatataagtgcctataaatcagaatataattcttataaggctgatgagttgaataataacgaaaaataaaagaagtatgatttataattttttagattcaaacttattccaaacattggtattaatagcaacagcagttatcactctttggatatatcgtgctagacaaaagaatgaattaagaaatgcggcaaaaatattgatgcttcaaattagagatatagaaaataatatagaatatcttttgtctgaaggtattattgatggatttgttcaagaaaaaccattgcattattctacaataatttttgagacaaaccattgggcaaaacactctcatttattggttggtaagttgtctcaattatcttttgagtctatagatgatttttttaaggtagcttctcgaattaaagaacaacaaatttttataaagaataaaattcaacaatctacagactataaaggtatgtattattataacggtatatactcacgggtaaattcaattttagataaagctgctatttctggtgaaaatttaatagaacaaaaggaacgatgtaaagatgaaattaaattcgttcaaaatttatatagtgattctttaacaaatgttccttcttttcttcaattagagttagtttatggactggaaaagactttaaagcaatatcataaactgacagatggtacagcatatacagagttagaacaattatcaaaataggttatatgataaaaatatcagaatcccaaatagaatctttcgccatccagctttttgagcatcttggttataaatcactttacggtcctgatattgctccagacggaccgaatccgctgcgtacgtcttttgaagaggtcatgctaaaagaatctttgcgtaaatcggtacaacgtatcaatcataaattaccagtgacggtttgtgaagaggcggtgaatgaggtatttcgtattgcttcgcctgacttattggccaacaacgagcagtttcatcgtatgcttacagaaggaatttcggtttcggtacatcgtgatggggctgaaaggggagagttggtatggttgattgactttgataaccctctgaataatgactttactgtggtcaatcaatacaccattgtagagaacggacgaaataaacggccggatttaatcttgtttgtaaatggtttacctctggtggtaatagaattgaaaaatgctgcagatgaaaatgctacgcttcaaagtgcattccgtcaagtagagacatatagggagactattccttcgttgttcacttataatgaactgattgttatatctgatgggctggaagcacgtgcaggatctttatctgctggattcagccgtatgatgacatggaagagctcggatggtaaagtagaggcttctcatttggttagtcagttggaagttttgattcaaggtatgctgaatagagaaagcctgcttgatttgatacgttcttttactgtttttgagaaaacaaaaactgaagatataaaaacgaaaatcacgacgataaagaccataaagaaagttgcggcttatcatcaatattatgcggtaaacaaggctattgaatcaactattcgtgctacgggaatgaatgtaggaggatgtgacggattttttcgtgaatcaccgataaattatggacttaaagatgtgaaacagcagcctgtaggtgaccataaggctggagtgatatggcatacacagggttcaggaaaatccctttctatggtgttctatgttggtaaggtggtacgaatgctgaataatccgactatagtagttattacagaccgtaatgatttggatgatcagctttttggcacatttgcggattgtaaacaacttttacgtcagacgccggtacaggcagaagacggtgaaaaactgaaaagtcttttgagtgtaaattcgggaggagtgatttttaccaccattcagaaattccagcctgaagagggaaagaatatctataagacattgacagaacgcagtaatgttattgtgatagcggatgaagcgcaccgaactcaatatggattcaaagctaagacggtggatgtgaagaatgaggctgatgaagtaataggttcagaaataaaatacgggtttgcaaagtatctgcgtgatgccttgccgaatgcaacttatttagggtttacgggtactccgatagaaacggcagacgtgaatacgcctgctgtattcggaaattatattgatgtatatgatattgcacaggcggtagaagatggagctactgtacgaatcttttatgaaagccgtctcgccaaaattgagctaagtgaagagggacgcaaactgattgagtcgcttgatagggaattggaaaccgaagaaatgaatgatgtccagttggctaaagccaaatggacacaattggaggctttgataggaaatccggctcgtataaagaatattgcacgggatattgttacgcattttgaacaacgtcaagaagtttttgatggaaaaggtatgattgtggctatgagccgtcgtattgctgtagctctatataatgccattatagaactgcgcccaaattggcattcagatgatttgaataaaggtgtgataaaggttgttatgacttctgcatcatctgatggacccgatatagcccgtcatcatacaacaaaaggacagcgacatttattggccgagcgtatgaaagatcctgatgatgaactgaaactggtgattgtacgcgatatgtggcttacaggatttgatgttccgtgtctgcatactttgtatatagacaaaccaatgcagggacataatttgatgcaggccatagcacgcgtgaacagggtatataaagataaaccgggaggtttggttgtagattatttaggtattgcttcagatttgaaaaaggctttatctttctattcagattcaggaggaaagggtgatccaactgaacagcaggaacaggcagttgccttgatggaggaaaaacttgaggtagtgcagcatcttttgcaccgttttgattatcatacttattttacggcagatgtttcacaaaagctttctttcatcttgcaggcagaagattttatcctaggactggatgatggtaaaaaacgttttgttaacgaggttaatgctttgtctaaagcatttgctattgccatacctcatgaaagggctatgatggtgaaagaagaaatagctttttttcaggcagtaaaagccagactttgtaagttcgatttatcatcttcccataaaacagatgaggaaatagagactacaattcgtcaggtggttgataaagctttggtatcggaaaaggtagttgatatctttgatgctgcaggtataaagaagccggatatatccatactctctgaagagtttcttatggaactgaaaggtatggagcataagaatatagctttggaagttttgcggaagttgttgaatgatgaaataaaagcacgtatgcagcgcaatcttgttcaaggaaaaagcctgatggaaatgttggaggcttctatcaataaatatcacaacaaggttattactgcagtggaggtgattgatgaacttataggattgagcaagcatattgtagcacaggataacgcagcaaagaagttaggtttgtcggaatatgaatatgctttttactctgctgtagcagacaatgatagtgctatggaattgatgggtaaggataaacttagggaacttgctgttgtattgacagaaacaatacgcaacaatgcttctattgattgggaaataaaagaaaatgtgagagcaaagatgcgtgttgctatcaagcgtttattacgtcgttttggatatccaccagatatgcagatgttggcaactgaaactgttatcaagcaagctgaaatgatatctgctgaattgataaggaaatagtattgtgggaactattcaaggtttttatgaaaagaatgcttattggaaattaagtgaaagataagcaaccaagttgctacttatacttggttgcttattgttaacaactggtgtgtttaatatttattttgtcttagttacaaatttcttttataagagaaactatattttctaaattctcatcactgtcaacaccatcgtaattcccaagatcacaataagcccacatgcagcaaccatcctccaaattaaccaggaatgcaaaaattctacattcgccacgattatacagaacaagaaagaggatagggctattagaatgacaatcaaaatataaaatgccttatatgatagataaatgcggttatccattatgctctgcctctgtgcacttgatctcaatttggtcaatgaactggccaagaacggcattgccaaattttacagcttgctcttgcgtatcctgggtaatagacagtttgtattttcctaataaatctaccaatgcggtaagatccgttctcaatccatacacattgtcattcaactcggcaagttcttttacgtttatgccaagcagacgtttttcctcctcaagatattcattttgaggagtacttttggtagcctgcgcttccttcatttcagcggtaaaatcaaatttctttttcataagcttatcgttttaatcctgttttcggtttctttcctaaggtacgaatggcagtaagcatccgataaagtacacattgtagacctaaaaactcttctattactttgcgatcaaaaacgtagttatgaaacgatcaatgagtaaagaagagtttttagcgctatatcagcgccaacagtccagcggactaaccataaaaaggatttctgtgataatgaatcgtatcctgcttcctgttttcattattggaagaagaaatatggattgagtcacccatataccaaacacaccgaacctacaggtgattcgtttatccctcttaatattaatcatactcctgccattcccacttcatcatgtggtgacaggcgtgtaaccatagaacttccatccggcataaagatccacctcaacatcctaagtaatccggagattatttatggcctgatcagtaaattatgtagccatgttctgcctgaatgatacgatgcgctacttcctgtgtcccgggaagacagatatgcgcaaaggaataaattctctttgtgggcttgttcatgataaaatgggatatgacgttcgacttggcgatgtgtttatctttgtcaaccgaagcagaacaaccatgaaacttctgcatgccgaagacggaggtatggttttatacataaaacgccttgaggaaggtaccttcagacttccttcctatgatagtgaaagccgttcctatcccatggaatggcgtgatttagtactgatggtggaaggcataaccgataatccgagtgatagactcaaacgtcttaaagccggtcgaaaagaaggattttattgattaaaaagagcttcctaaacttgtatagctgtacgattttcagtatctttacattataataagatactaaaaagaatgattcatacagatacgatggaactaataatcaagaatcaacaggagcaaataaaagggcttctggagacaaatcgtacccttgtagaatcaaatcagaaacttatggaacagacgggagaactgcagcaaaaagtacaggaactcctgtcgcaagtagcctggttaaacagacagcttttcggcagaaagagtgaaaagctggcatccttggatcccaaccagcttgccttgtttgataccttggttaatcccaggcaagaggaaacggatcttgtggagactggcgtaggcaccgggacatgtaaaccggacggaaagaaaaaagaatcccgccgtaatcgggaactgttagaggggctgcccgttgtggaagtcattgtcgaacctgataatgtggatctgaatcggtatcgtcgtataggtgaagagcgcacacgtacgcttgaatttgaaccgggaaagctatacgtaaaagagacagtacgtcccaaatacggactcaaaaataatttaagtcttcccaaagagggtgaaagcggtgtcataatagcaccgcttccaccttcccctatatacaaatgtctggcaggaccttccttgctagccgaaatacttctgcagaaatatgaataccatgttcccttttaccgtcaggtaaaggaatacagacatttgggtgtacgactgccggaaagtactttaagcgggtggtttaagccggtatgtgagttattaagtcctctttattcggaattagtaaagctcgtaacgggcagtggatatgttcaggtcgacgaaaccacagtacgggtcatcaacaaaggaaagggaaaaaccgataaggagtatttatggatggtcagggcagttatggaaagaccggtcatcttccattatgatgacggttcccgatccggacagacaatcagaaatttattaaaggacttcaagggatatcttcaaagtgacggttacagtgcctacaatgcgtttgagggcactaaggatgtgtgccttattgcctgtctggcccatatcagaagacatatggagttggcactggatgaaaatagatcacttgctgaatatgctcttaaacaaatacaggaactatatcatattgaacagatagcagatgcccgaaagctcgatgcgcagggacgatgtgcactccgccagcgtttagcaactcccatacttgactcctttgaaaaatggatggaacagacttatggaaaagtaccaccaagaagtcgcatgggacaagctattacctatacttatcctctttggccaagaatgaagaattacctgaaagatggaaatctgaaaatcgataataatctggcggagaatgcgattagaccacttactgtcggtgagaatctaaaataccatgcagcttttctgtcttcggcatgcttggagaaatattcaaggatatggaatgagaacggcaatacgtgatattgcagaaggagcggaaatgggattggaaacaggaagcgtgtccgggctttcatgcagtttatacggcagtgttgattttggggaggattacagggaagtgacaggaaggttagccgttccggagaaattgtatgtgtacgttgttcttttcgaaatacggagtcttttaaaatcatggaagacctcattcgggaatgtgttccaaacaataccccgccacggaacggttatgacacttgatatcaggccgtaagccgttccgtagcttcagtatcccatatcccatgcatgaatgtggatcaggcggcatttcacctccttgccccgtttacggacatgccgatgcgttgcctgccggaattctcattcaagcagttttcgtccgccatcatcttccaacacacgcatttgctggatggctatccggttcagtctcacgagccgttcgccctgcggtatgccctggtctatgaatacggcgttcaggttttccatattggagaggcagatcagttcattgatggaggcatagtcacggatattgcccttcagaccgggattctgctcgcgccacatcctggcggtcatcccgaacatggccacgttgagcacgtccgcctcttccgcatagatgatgccggcctgtgcgggggtgacttccaccggtatcaggttctgcctgatggcatcggtatgtatgcggtagttgatctttgacagttcccgtttcgcactccagccgagctgggcctgctcctcctctttcaaccgctggaactctttcagcaggtacagcttgaactgcggggatacccacgtggcaaactcgaacgcgatatccttgtgcgcgtaagttcctccatagcgtccggccttggcgatgatacccttggagttggtttttaccacccattgtttgacggaaaggacgaaacggttcagcccggcctcgtttttaattccctcgaattcgggggaattaaaatccgtattgtacatctcctcccatatgcccagaaactcgacggtattcttgttacgcaaccacttttcaataagggcgggaccgttttccatattgcggaccatgtcggtcagggagatataatccttgtcattgtatgtgatgactgtcacttctgtatcctggactttaattttagccatgttcttttaacggttattcggttattattggttcgatgtgcaaatgtacggtgtattttccggaatgttcctctatatccggaaaagtttgtgtcacgccgcccgttgcgacaagccgtttctaccaaggaaagggcaggcaataccggctgacgtggatacgggcggaacaacccgcatatgcaatgcagagggagcaggagagccttcaccacagccggagtggaaagcggtctcatgccggggtacggcatgaaaaggggctcccggacagttcttttccttgtcgcacatgcactacgtcggtcgcagttttcgccttctgaatccctcttacgtccgtccctgcgctttcggagcgtttttccggcagaaaatttcaccatgcggaaattttctgccggaaaccggagggaaaacgcggagtcccgcagggacggacgaactttgatgaggaaggggaaaatcgtccgtttcataaataccatttcctcatatggcatcgcatatttccttctccatcttttccagcttatgggacaggatttccatgtcgctgctgatcttctggttggttatccgggcatatatctgggtggttttcagatccgtatgccccaaaagacggcttacggtctcgatgggcacaccgtgcgagagcagcacggtggtggcgttcgtatgccgggccacatgataggtcagccttatcttgaaaccgcactgcctgccaagttccttcaatatggtgttgcatctgccgttgctcggtaccggaaatacatggtcgtccttggacagccccttgtacttctctatgatgcgcctgggaacgtccagcaggcggatgttggactcggtgtttgtcttgcgccggcgggtgatgatccagaggttgccgtcgaagaaggtctggagccggtcggtcgtcagcgccttcacgtccgcgtatgccagtccggtgaacacagagaagatgaagaggtcgcgtaccagttcgcaggtcccgcttttcaccggggtctccatcagcgtctgtatctcacgctccgtcaggtagccccggtcaacgctttcgggggagttgatgtacccggcgaaggggttgaagggaagcgcaccgctgttgcgggcgatggagatgacgtgcttgagtccgatcatgtaaccccatacggtattggtgcggcatttcttctccgtacgcaggaaatactcgaagttgttgatgaacgtcaggttgagttccttcaggggaatgtcgtcacggcggtatactttcgggacgaactcgcaaaggtgcctgtatatggtacggtagcggttgtatgttccctgcacgcggctgtgtcccactttcttgatgaactccccgttgtgctgctcgaagagtttcaacagcgtctcgcgtttcacgcccagcccgaggcaggcgtccctcagcctggcggcggtgacatagccgtcggactgcatcagttcctgataacggcggttcacgttcacgcgtatccggtcaaccgccgcattgattttctgcgcctcggcgctcttgcccgtggcacgtgccgttttcacgtcccaaagtttcggaggtacgtccagtttacaactgaactgcttgatttcaccgtccaccgtaagacggcacattagggggagatagccgttggctctctcgctgcccttcttcacgtagaagaggattttgaaagtcgatctgctcatactcgttttcatacttttttgatcgttacaaagttaatatcaagcgagttgtcctcaggtatgaaaaactgtgcaaattgctgaaatagaacccgttgtgccgtttcttattcccgttatatcagtaacgatatgggaactgaagtctttcgcagtttttagcggatctcctttttcagcttatgcagtattatgagttaaacacctaaccacttaatagactgcatttttgctgtattatcatcaaccttgctttttcttgctgcgtttactttaaattcttaactttgttccccttgaaaaatgattgttacaagataatttaacagctaaaaatgcaacaatataaaagaccggaagctataaaacgtatgaatgagctggcgggtagccggaagcctttcctttttattatagattataaacagcagtgttccttgatagaggaaataagtcggattgattctacccgttgccgttataactttaatggagtgaaaaatgtggatactgtaacagaaagttacagtgggcagatagactggaactttgttccaatgtctttgacagactaccggcaggcttttgaaatcgtaaaacggaatattctggcaggtaacagctatctcgctaatttgacttgcaaggttcctgtcagtactaatcttactttggaggatgtgttccggtactccaaagcgctttatagactttggttgaaagataaactggtctgtttctcacccgaaatttttgttcgtatagaagatggcgagataaaatctttccccatgaaaggaacgattgacgctaccttacctaatgcggaaaaactgttgatggatgattctaaggaaactgccgaacatgctaccattgtagatctgattcgtaatgatttgagtatggtggcggaacaggtcagggttgtccgctatcgttattgtgaccggcttgaaaccaataagggacctatctttcagacaagctccgaaatatgtggtgtcttgcccgatgattacccatcgcatataggagatattatatttcgtttgttaccagccggttccataaccggagcgcccaaatccaagacgatggatattattgaagaagcggaaaattatgagcgtggattttatacgggcataatgggttattgtgacggcaggactttagacagtgcggtgatgatccgttttttagaacaggaaggagagaatctttattataaggcggggggaggaattacttcaaagagtgatttacaaagtgaatataatgaaatgatacagaagatttatgtacccatttattgaaactatacggatagaacaaggaaaagcgtgtaatttgtcttatcataatgaaagactgaacaatacccttcatcatttctggccggactgtgccggcatagaattaggtgaatacctgaaattgacaccggagatgaacggaatgaaatgtagggtgatttatgatggaagtggaataaaagaaattagttatgaagcctatcagatgcgtccggtacattctttgcagttggtttattcggatgatatagattatacttataaaagtacagacagggaagctttaaaccggctttttgcctgccgtggagaacgggatgatattttaattgtcagacgcggactgctgaccgatacttccatagctaatattgccttgtttgatggtaaggattggttcacacctaaattacctttgttgagagggacttgccgtacagcattgattgacaacggaattataaaagaaaaagatatccggccggaagaactatcctcttattcttttgttaggttatttaacgctatgattaaatggggagcgttggaattttctaccggaaccatttacggataataagaaagaaggtggaattttgaagatttttgtttgtttccttaaataatttgctatatttgcaaaaaaaatataaatataggtagggtatgagattgcggacagttgccaagttgggtatggtgctatcagtggtattgttttgtacggctgtgggcttttacggctttgctaaattaagcctgacggataagagtcgtgagatcaatctcttctcacttgtaccggctgattgcatcggtgtgttggagagtgataatattaattattttctgaatgaatttcctcaattgaactattctgaagaactgggtaatttccagtttcccggtttgtttaattatgtgttgggaggtttgaacgaatataccactaacactgctcatggtctgagcagtaagatgagccgggtggtggtcagtttccattctccgggtactccgcgtgaccaggtggtatatttccgtatgggggctgatgataaggaaacattgggagatatgttgttagagagaactccgggaagtttttcacctaaaaaagagaaatacagaggaaaaactatagcagtctatccattgggcaataatgattttctagctgtctatagcgaggcgggattctatgtggtgagttatcagaagagtttgatagagaaagtgattgatgcgcgtgaggatgaagagaaagcattgagtaatgatcccgtgtttgccaaagcgatgcagaaaaagaaaacgcataacttcctgactttatacggacgtacaccgtctatgcctttcttgcaggataacagtggctgttggagtgagtttgactttcacatgaacagtgatgtggtgtacctcaccggagatacttttatgcctgattcatgcggctgtgtgaaccagatggccgaaaaattgaagaatattccggatataagggaagatagtttgattatttctgctgataaagattccatggcaaattatatggaagaggcctacgaaagaaatagcaggacattgttcaatgaatgtgtagccaatctttcacgtgatgcagcctttatgcttgtggcggacatgaacaagatttcccgcaacccggaacgtttcgagccttatttgccggcatttctgttggagaatgctcctttattccattcgtttattctttcaacccaattgtcggttgtgaacgaccggctttcccatatcatggtactgacatataaggattagcgcaacttatgtcggtggaagtggggagccactttgcttctaaaataaaataacgaaataacagtgagtgcggctccgaatagataggccatcttgaaggtggctatttctgctatatatccgcccaataacatgccggcgcctatacctacatcccacgaagtcaagtaggtactggttgccgtaccacgctggttgttgggggccaagttcacaaacagcgtgttataggcagggaacatggttccaaacccaatacctagtaaaagagctatggtgaacagaaaataagtggtccattgcagactccatgttgtcagccatccgcatgaactcaaaccgaagaaacagaagcagaccagatacaggccggcttcaataacttgagtaaccattccccggtctaccaggcgtccggagaaaagacgggaaactgccattcccaacgccatgaaggtgaagaagaaaccggtggatgactggatacctatttgcttggcatacattgcaacgtaattggtggtcatgccataagggatggatagtaataacagactgaaacctgccggtattcctttaagcaaaataaagcggtccaatgatatcggttctcgttttacaggaggtttgtaggtggtctttaccaatgaggcgcatagaaatcctatcaggcaggaacctaatgagcaacagaagataagcgtatagtctgctcctgcatcatgtaggaagagtccggtcatcggtccgatggacatggctatattgtttgccagcccataatatcctaatccttccccacgacgtgaagaaggcatgatatcaatgacaatggtatttccgctgactgtcaccatgccgaatgatactccgtgtataatgcggaataaaataaataaggttagtgttcctgcaatgagatatcctccgaagatggcggtaaaagtgaaataagccaacagataaagtggtttgcgggcaaatgtatctaacagatagccggaaaaggggcgtatgcacagggcggcaatggtgtaacaggaaagtacggcccctatggttgttttgttggcgtcaaaaacttctgccagatagaaaggcaatacaggcatcagtaaccagaatccaaagaataatagaaaattggctgccagtatttctatataatttttggtaatcagcttgtccttcataagcaataatgtgctaatatgtcaatgtatcaatatgctaatgtggcaatatgttaatatgccaattgaccgcgttctattccgcatggcaattggcatatcagcacatggtcacattgacacattattaattggctgcttcgaattctttcaggaagcgggtatcgttttcagagaataatcgtaagtcgtttacacgatatttcaagttggtaatgcgttcaatacccatacctagcgcatagcctgagtaaactttgctgtcaatgccgttggcttccaatacattcggatccaccataccacatcccagaatttccacccagcctgtgcctttacagaacggacaaccttttccgccgcaaatattacaactgatatccatttcggcacttggttcggtgaacgggaaataggacggacgcagacggatttgagtatcttcgccgaacatttctttggcaaacaacagcaatacctgcttcaaatcagtgaatgatacattcttgtcaatgtagagtgcttccacttgatggaagaatgcatgggcacgataactgatcgcttcattgcggtatacacgtcccggacagatgatgcggataggaggttgcgaatgttccatagctcttgcctgtacggaagaggtgtgagtgcgaagtacgatgttctttttcacatcttcctgattggcttcgatgaagaaagtatcttgcatatcacgtgcaggatggtcttcggcaaaattcatggcagtgaatacgtgcaagtcgtcttctatttcgggaccgtcggcaatactgaagcccagccgatggaatatatcaatgatttcattctttacaatgctcagcgggtgacgtgttcccagttcgatgggataagccgtacgggtaagatccatttcggctgcgctgttatcttgggtttcgaaagcttctttcaatgaggcgatacgctcctgagccttgttcttcagctcgttcagtttcatacccacctcttttttctgctcggcaggtacgttgcggaagtctgccatcaactcattaatcgctccttttttgctaagatatttaatgcgcaaggcttccaattcttccgcattggctgcttgcaagccttcaatttcctgaagtaattgttctattttagctaacatagtttcttctttattttttaatgaccgcaaagttagcgaattaaacccatatattttgctgaaaactaaaaaaaacgatatttttgcatcgattttttctaaatatagaaaatgagaaaacttataatcggagtttgtctgcttatgctgataagctcctgtggaggtgggaaaaagaaaatggaccccttcgagacgcttactgaggagattgattcgctgactgcaaccccggacacaacagaagcgatggctgtggtagaggaagaaccaatggttcccgctacggccgacgaaagttttgccgactttttctacaattttgccagtgatgaaaaattacaattgtcacgcatcgtgttccctttgccgtattatacaatggaaaagaaagagcacattgaaaaggagcaatggaaacacgatcctttattcagccggcaggatgcctatacagttctgttcgataaggcggaagacatggaaatggagaaagatacgggtctaaccagtgtcaagatagaatggatttacttgaagaagggaaaaatcaagcggtactattttgagcggctgaaggggctgtggaaactggaagccatagattttgcggatatgccgagagaggataccggtaaggaggacttctttgagttttatgaacgttttgccaatgattctgttttccagttgtctcgtttgcacgaaccgttgaagtttgtgaccgctgatcccgaagacgagtttcagatactggaaacgactttggaggccgggcaatggttcgcattccagcctgtattgcctcgtgagaatctgactaatgtaaactatggccagaacgagaatgtgcattccaatacgaaggtgattgaaatgaaaggttttggcaatggatttaataatacgctctattttgaacggcgccacggtctgtggaaactgatgcagtttgaggatctgagcgattgatttgattgtaaatgaaggaaataaaagactactctctgttgcctcataatacatttggtatggatgtgaaggcatctttgtttgtggaatatgaatcggtgacagagctgcaatccatcttgtcggataaaaaactgatggccggtaactggttgcatattggcggaggaagcaatctgctttttaaaggtgattatgcgggaactgtcctgcattcggctatccgggggtatgaggtggttgctgaaaacgaacaggaaatagaggtaagggcaggagccggtgaggtgtgggatgattttgtggcatataccgtgaaaaacagttggtatggtgctgaaaatctgtcattgattcccggtgaagtgggtgcttctgccgttcagaatatcggtgcgtatggtgttgaggcaaaagatttgattgtaagtgtggaaaccgtcgaggtggaaaccggcaggaaacggatttttaccaaagaggaatgccgttatgcttatcgtgaaagcattttcaagaaagatttgaaaggtaaatatatagtgacttacgtcacctatcgtttaagtaaacagccggtttttaatctggagtatggaaatgtgcgtggcgaattggaaaagcgaggaggtgaggtggcattggagaatgtaaggaaggtgattattgccgtgcgtgaagccaagttgcccgatccccgggtgcagggaaatgccggaagtttctttatgaatccgattgttccacgcaggcagtttgaaatagtacagcaacagtatcctgatatgccacattatgaggtggatggcaatagggtgaagattcctgctgcatggatgatagaccgttgcggctggaaaggcaaacaaataggacgcgcgggtgttcattctaaacaggcattggtcttggtgaactgtgggggcgctacgggagatgaagtgattgctcttgccagacggatacaggagtctgtgcttcaaaagttcggggtggctatctctcccgaagtgaattttatataaggtatgatatgaagattacaatactaggcagcggaacgtctacgggagtacccgaaatagggtgcaaatgtccggtatgcaccagcagcgatccccgggacaaccgtttgcgttgttcgggactggtagaaacggaagggctccggattctaatagattgcggtcccgatttccgtgaacagatgatacggttgaacgatttcaagccgttggacggcgttttgattactcacgaacactatgaccatgtaggaggcttggatgatttgcgtcctttctgtcgttttcgcgatgtgccggtttatgccgaacaatatacggcagagcgtttacgccagcgtattccttattgttttgccgaacatctttatccgggagttccccgtattacattagaggaaattgttcccgattctccttttattatcggcaatcccgaaggaaacaaagtagaggtgacacctcttcgggtaatgcacggcaaactgcccattttgggataccgtatcggccggatggcatggattaccgatatgttgacgatgcctggggctgaatatgatttgctgcaaggactggatgtgttggtaatgaatgcattgcgtcctcagcctcaccatacccaccagaatttgaaggaggctttggacaatgcacaaagaataggagccggggaaacctattttattcacatgagtcatcatataggattacatgctgatgctgaacggttattgccgccgcatgtgcattttgcatacgatggaatgaaaatttgtttataaagccggcttcaacgaataccggcacaatccgttcaacccgcattccgaacatttcggtgtccgtgccacacaaacatatcttccgtgtaaaataagccaatgatgtgcggtgggcacaatctccttcggaatatacttcatcagatatttctcggtagccagcggtgtggtgcaggtttgaggaaccagcccgatgcggtggctcacgcggaacacatgtgtatctaccgccatggccgctttattgaatactacactttggatgacgttggctgtcttgcgtcccactcccggcagtttgaccagttcttccaatgttcccggtacttcgctatgaaaatctttcaccagcatttgcgccatgcccaccaggtgttttgccttgttgttgggataacttacactccgtatgtattcataaatcacttccggcgtcgaagcggccaatgcctcaggagtcgggaaatcccggtaaagaggaggggtgatcatatttacccgtttgtccgtgcattgtgcactcaggataacagctatcaataactcgaatgggttattgtaatgaagttcggtttcggcaacaggcatcgcttcttgaaaataagcgatcaccttgttataaagttcttgttttttcatcttaccttcttttttcggttacaaatataattgataaatcaatagggtagaattattcgggcaattcatttgtttagttgagtaaacttcttatatttgcataaatatattagatttatgcagcttaacgtaaagaatgaaacttctacattgaaagctgtggtgcttggacaacccggttccatagggaaggtccccacgctggaagaaacttatgacgccaagtcatacgagtccgtattgcataacatatacccccatgaagaagatattttcaaagagatgagatgctttgaaagcgtattgttgaaatatggggtacaggtctatcgcccgtggacactggagaattgtaatcaggtgtttgcccgtgatgtgggatttgtgattgacgacaagattattgtttccaacatcatccccaaccgggaggatgagaaggaagcctacgaagtggtctataatcagatagcttataacaagattttcaaccttcccgaaaaggcgcacgtagagggaggtgatgtggtgctttacaataatatagtgtttgtaggcctttatacccagcccgattacccgcagatgaagacggcacgtaccaaccggtatgctttttcctttctgaaagaaatctgtccggggaagatattcatccccttggagctgaaaaaacataatacagatccacgtgcggggattctgcatctggattgtacctttatgccggtagggaaagggcatgcgattatttataaggacggatttatgtatcctcaggattatcatactctgctcgatttgttcggcagggagaatgtatttgaaataacgcgggaagagatgtactatatgaatacgaatgtcttttccatctctcctgaggtagtggtttctgaaaagaactttatccgcctgaatacctttatggaagaggtatggggaatgacggtagagcgtgtaccttattatgaaatatctaagatgggcggactgttgcgctgctccaccttaccattaatccgagaaaatgactaaacaaacaacaaaccacattttgatggtggaacccgtggccttcgggttcaatgaagaaacagcggccaacaattatttccagcagcggacagttgcggcaggtgaaacagtacaagcttgtgccttgaaggaatttcggggcatggtggataagttgcgtgcaaacggcatagaggtaatagcggtgcaggataccccgatacctcatactccggattccatatttccgaacaactgggtgtcctttcacgacgacggaacggtggtgctgtatcctatgtttgcggaaaaccgcagggcggaaagacgggcggatatcttgcagcggatagagtcggaggggttcagcatccgtcggaaggtagattatacaggttttgaagaagaaaaccggttcctggaggggaccgggggaatcattctggaccgggtgaaccgttatgcatacgcggctttgtcgcaacgggtggacgaagctttatttggtcggttctgcaaggagcagaattttagtccggtgtcctttcatgcttatcagactgtaaacggacaacgtctgcccatttatcataccaatgtcatgatgtgtgtggcgacagattatgcggtcgtttgtctggacagcatcgacgacgtggaagagcgtgagcaggtttgtcacgtcttgcggcagacagggaaagaaatcattgccatctccgaggaacagatgcatcattttgccggaaatatgcttcaggtggagaacgggaaaggcgcattgtttctagtgatgtctcaaagtgcttacgattcgttggatgaaggccagttacaacggctgtctaagtataacgcgttgcttcccatgcccatccctaccattgaaacgctgggaggaggaagtgcccgttgcatgatggcggaaatattcttgaagaaagaaaaacattaaatgataaaaagcttatggatgcaaaattatcggcagctcaattgatggagcttgagaacaaacatggagcacacaattatcatcctgttcctgtggtattggataagggagaaggtgtgtttgtatgggatgtggaaggaaagaaatattatgatttcctttccgcttattcggcagtgaaccaaggacattgtcatccgcgtattatcgatacgttggtaaaacaggcgcgaaagctgactttgacttcacgcgctttttataacagccagttgggacggtatgaagaatttgtcacccgttatttcggatatgacaaggttttaccgatgaatacgggagccgaggcagtagaaaccgcattgaagctttgccgcaaatgggcgtatgaagtaaaaaagcttcccaaggatacggcggaaatcgttgtatgccggaataattttcatgggcgtactaccactatcgtttctttctccattgatccggacgcttacaataactacggaccttttacccccggctttgtcgtgattccctacaatgatgccgaagcattggcgaaagtgctggacgaacatcctcatgtggccggattcctggttgagcccattcagggagaggcaggtgcttatgtacccgatgagggatatttgaaaaaatgttacgacttgtgccgtgcccacaatgtactttttatagccgatgaagtgcagaccggcattgcccgtacaggcaaattgctggcttgtgactatgagaatgttcatccggatatcctgattttgggaaaggctttatcgggtggggcctgtcctgtttctgcggtattatcatgcaatgaagtgatggatgttatccgtccggggcaacatggctccacttttggcggaaatcctattgctgcggcagtggctgttacggcgctggaggtagtacgggacgaacagttggcggacagggcatacaggctgggactgatattccgggaagagatgagaaaactgtgcgaaacatctcgtgtggcttcttttgtccggggcaagggattgctgaatgcgttgataatcaataatgatgaaacgaaggatttggcgtgggagatttgcttgaaattggccgaaaacggtttgctggccaaaccgacacatacgaatattattcgttttgctccgccattggtgattacagaggaacaattaaaggagtgtatcgaaattataaagaagacgattgctttgtttgaataaaggattttttatcctgtcttttaggggtggattcaatctgcccctaaaatcgttttcactgatacccacctgtttgtgacgcttcatctttcattgttccatactgtttggctatagaaaaggtaattatttgatgaggctgtttcttcttgataagaatatttaatgcagttatatccggttaactcggaaataatttctatctttgcaccccgaattaaaaaatagacgtatgatgccgtgaatagcggtcgtgtattctagaacaccacgtaaaaaacaggagaaatgaagaataataatactgtatctgtatcgttcatgttgcttggcatactgttttgtgtatgtcttgtcgcagcaaatttattggaaaccaaagttgtccagatctggaaaattacggcaactgccggactggttgtatttcctatctcttacattatcaatgattgtatagccgaagtatggggcttccgcaaggcacgtcttatcatttggatgggctttgccatgaatttcatggtggtagctttggcgcagcttgccattctgatgcccgcagctccgttttgggaaggagaggagggcttcaacttcgttttcggcatggcgccccgcatcgctgtagccagtctgaccgctttcttggtcggctcttttctcaatgcctatgtcatgagtaaaatgaagctggcttcgggaggaaagaacttttcacttcgtgccatcacttctactttggtgggtgagagtgccgattccatgattttctttcctgttgcctttggaggtttgatgcctgtcggtgaactgataaagatgatggttattcaggcagtgctcaagacactctatgaaattattatcctgcccgttaccatccgtgtggtaaattacatcaagaaggtggatggcagtgatgtctttgatgagcatatctcatacaatgtattgaaaatcaaagaactttaataagatgctgatgtgtcagtgtgccggttagccaattaccatgcggtatatggcgcagcatatccacatagcgcggcaattggcacattggcgtattagtaaattgaaaaattgtcaacaatgaataaaagtgacgcattggttgtgttcagcggagggcaggactcaaccacttgcctgttttgggcaaaaaaacatttccgcaaagtgtatgctttaagctttatctatggacaaaagcatgtgaaggaagtggagctggcccgtgctattgccggaaaggcaggggtggagtttaaagcgatggatgtttcctttataggcaacctgggtaaaaattcgctgacagatactacgataacgatggatgaggtgaagcctgccgatagtttccctaatacgtttgtgccggggcggaatttgttctttctgagcattgcggctgtctatgcacgcgaattgggaatcaatcatatcgtgaccggtgtgtcacagacagacttcagcggttatcccgattgccgggatgcttttatcaagtcgctgaatgtgacattgaaccttgccatggacgagcagttcgtgcttcacactccgttgatgtggattgataaagcggaaacatgggcgttggcggacgaattgggcgtgctcgatttgatccggcatgaaacgctgacttgctataatggcgtacagggggatggctgcggtcattgcccggcctgtaagctccgtcgtgaaggattggaaaagtatctggagataaaggcggaaagagagaaatgctaggataaacgaaggtgttttctctttgtatgaaaggtgttcctttcttgccgggtatatcgtttcactttagtgagcaaattttatcactgaagtgaagaagtttcatcactcaagtggtacagtttcatcacttcagtgaaacgatgtacttgacagggagagaatttctattccaaggtatgaaagagaaaacatgaatatgaaaaaaacagattttaatggaaagaaaagatgaattgacccttctcgggtcgaagaccgagtacaggcaagattatgctcccgaagtgttggagtcctttgtgaacaaacatcccggaaacgactattgggtacgttttaactgtcccgaatttaccagtttgtgtcctattacaggacagcccgattttgcggaaatccgtatctcctacctgcctgatgtgaaaatggtggagagcaagagcttgaagctgtatttgtttagtttccgtaatcatggcgattttcatgaagattgcgtgaatatcatcatgaaagatttgattaagctgatggatcctaaatatattgaggtgacgggcatttttactccgcgcggtggtatttccatttatccgtattgtaattacggccgtccgggtactaagtatgaggaattggcggagtatcggatgcgtaatcacgatttatagatgtatctcttggaatgaatagatagattgtggactcaaatatttgctggttttgaaaatttgttctatttttgcactccgaaaaaaggagaggtgctcgagtggttgaagaggcacgcctggaaagcgtgtataccccaaaagggtatccggggttcgaatccccgtctctccgcaacaaacgctgaaaatcagcagattgcaaaacaaacacccagttttacacccaagaatgtaaagtcggtgtttttgttttatttaagataatacaaccactacataataaaagagtagcgatattaaaagaatccgatgagaaaagactaatatttatctatccattcagtttgatttttcaggactttacatcgtcctgaaagtatttgttattgtattccaacgtcaggagtggattataatacaagttttttgtgtggatagaatttcgttttgcttaatgtacgaaagtacttatctataaacgcatgaaatattagcacaatgaatcattggaaatcaactttggccgtgataggaataggccaactcatatctattttaacaagtacgattgttggcttctccattattttttggattagcaacgaatttaaatccccgacagctttatctctggctattttagctggatttttaccacaatttgtattaggcttgtttgccggggtctatgttgacagatggaatcgaaagaaaacgatgttttattcggacttgttcatcgcgttctgtaccctatgtctttttattgtgataaccaagggttataaagacctttcttttttttatctattgactgcttgtcgttcaataggcagtacgtttcatgcacctgctttacaggcaagcatccctctactggttcccaagcaccatcttgtcagggtatcaggtttgtaccattccattcaatccttcagtgaggtgatagctcccgttgtaggggcaagcctcgttgtttggcttcccatacagtatattctgctcatagatgtgatcggagctgttgctgcttgtctgaccttactttgtgtccagattccttctcttcaaaaaacgaaagttcttccagatttcaaaaaagaactgacggaatgttggcataccttgcggcgtacaatgggcattttgcctttattcgtatgctttacgctggtgacttttgtccttatgcctgtttttacgttatttccttttatgacgcttctgcatttcaacggaaacattttgcaaatgggagttgtggaaatgggttggggctcaggggcattgttgggcggtttagtacttgcctgtaaggctttgaaaagcaagcaaacattagtgatgcatacggcttatgtgatattgggattgtatctgattagcgccagttatttaccatcaagcgcatttataggttttgtttgcctaacatttacaggaggcatagcctattccatttaccatgcgcttttcatcgctattattcagcagaacttggcttcggacatgcttggacggactttttctctcatctttagtttgagtacctttccatcaatgctgggtatcgtagcttcaggatattgggtggaagcatggggtatcacatccgtctttatgatcagcggatgggttatctttctgattggagtgggtgcaaattttatttcttcaatcaagcagttggataattacgcatagtattatttattaaagaattattatatgacaaagaaagaacacactacgattacagagttatttcaagttttggacttgttggaaagcctggacatgcagttttggttggatggaggctggggagtggatgtcttgtacggacagcaaacccgcttgcatagagatattgacattgattttgatgccaattatacagaccaactccttgatcttttgcaggagagaggatatcaaattgaaacaaattggttgcccacccgtgtggaactgtatagcaaagaattaggctatattgatatccatccttttgtcttgaatgcggacggcacttccaaacaagccgacttggatggaggctggtatgaatttcaaccggactattttggaacagcagtctttgaaggcagaagcatcccttgcatttctgcaaaagggcaacaagtattccattcgggctacgatttaagagagaaggatattcacgatttatctataattaaacaatgtataacaacaatgagcctaacaattagataagaacaagaaaatgacagaaaaacaaattgtctggtatatcttacttacagaagtaaagatagacagtgacacccagtctgtcacatccctgagtgtagctccattggcagtcttgccggaattccagcgtaagggaattgggggggggatgttgattcagtaagcccatcagagggcagcacttttgggttacggcacagcagtcgtattggggcataaagagtattatcctcgatttggctatcgcaaggctatcgatttaggaattgaatttcctttcgaagtctctcatgaatattgcatggtggctgaattaatacctggagctactgagaatgtgaaaggtatggtttgttatccaactgactttaaatagtttaacaagtaaaattcattatataactcggactgggtatttcaatttcccagtccgtattctgatagtacttattcaattggaagattgtgttgcttcaagaatgaaagtttatcccaataccctctttgaaagacgattttgttatcttttacatgaaaaaatccgcatccacgaagtccaagagagtctttccattccatgatagcccattcgccatcttcaaaaatattttccaccatacaaaccattttagcagtggcaaattcattcacaaacattttgtagattgattctttacctattattggttcgtttgcgacttgatgatttactgcattagtagcatacagctctgctatatgataagcatctgctttgttaaagcaatctatccatttttccaaaacttctttaggcttcattttttataaattcttaggattttgattctgtaataaaaacaatctgtttggatgcatagatacttgattttattaataataggctattctatattctaaatcctctggatttttgctctctctgcaccgagttacgtagattctgctgtaacttttcccattgttccttaaaccattgtactatgggttgtcggtttatggtcagcataagcttaccactatccatcggatgtttctcaaccctaaaaatatcattcttgatgtcaaatttccacctgtgttcttcggaataaattttgccactacattgtatggattctttctttgtcaagaggttttctatcatgtctttggtaaacccgataacagcgcataatttttccattctcaacatctctttgaacatgggaaaccatttgtgggctttttcaagcaaggtgctcaatcgtgatatttccttgtctttggcttcaagttcttgattatgtattctttgaagattacgaatttgtctgctatgctgttcctgtatttgttgtatctgaatttttaattcatcagtagctttgtcccgtttggtaatttcctgatgtagctgctcgatgtgatgttccagttctttcagcttaccgcttccgaaaagagaacctacaccgcttgctatggcggtagcagcattggtggctgttttctttagtttgtccgtgcgtatctctgcttttacctgtttgagttcctgttcggcaaggcttacttgttgttccttgtgtcgcttggtttcctctatacgttgcagttcggctttctgcttctcaatgatgaaatcatttcgttccagatgctctttacctgtgacagcttttgcctgtccacgttccatcaggagaatatcggaagcaagggtctgcatggttgccatatcctcgtcattgagctttcggctctttccagtttcatggttcatccagtcgaatacgacatgagcatgataatttggtttgaaccatctgttaccgacttggaagctctccttgtcttctgcttccggctgaccgttcagccaatgcccttcgtctttatgcaggaaaatctgtagcggagtgatgccccagcgtctttggcactcttcaccgaatttgcgtacatcagccagtgtggtgtccggtctgataagcaatactccttcacggatgggtgagcatcccgccaccttgataatctttccattctttcccttgcgttccctttccttttcctgcatggcacgtccggtcttttccttgaccatttgcttgatattgtcataatgagttcgcagttcgggagtgccgaagtcgggatttatccactgttcgttatcggtggaaagttcgggaacgacatagattctggactccccgatattacgcatatactcggcagtccttcggttgtgtgcctcgctcgatgcgatgttgcaaggcttgatatgtatgcttgattttgttgccatagcttctttcctttgtttacaattgatttactttgctcgctttcgcagaggggttcttaggggtaacccataagcggagattgcaaagagagggtcactctttgctcggggttctcaggggtgaaacgccctgagtgggtcattagggcaaagccctaatcccctcgggagagcccacaactacgaaagcgaagcgtgtagttatagtgggctataaccggaagcctttcggtttcttggatagcgtatcattcctcttttcgacagattgcgcttgctctttcctatcggctattcgtttctgtaaatattcgttcagatctttacatccactgtagatttgcgaggcgtcacgtatataccgggtagcatcatactcctttcggatttgctgtattgcttccattcctgcacggtcattgtcaaagaaacagtggatgcgctcatagcttcccaacggatagagtgccttgggaacattggctacggaattaagaactatgtaatcctgtctgtcgaagtcgggtgattgcggacagctttccagccttaaagtaagaaaggaaaggtaatccataaatccctcaaaaacgtaacatgtactccttggttttcctgactgtctgatatgggatatttcttttggtgcgatacatcccttgaaatatcggttgcgaatttcatatccgcctgatatgttcggaaaggcaatggcgaaataccgtttgccgttgtgggtgaaacgggcttccttacattctcttttcgccagtgccgtgtttatccctctttcctgtaggtaggcaagcagggcaggagaagccagcagcacaatgtccaattgctgaaaactcggttcggaaaatgattgcttgccaaaagagaaagacacgggacgtatgtgtggtatctgttcttcgattttctgtagaagataaggcacatagtcggaacagtagagttcctgtgccagtgcgatgatatttccacctttgccgattgcgaaatcataccattggttgcgctcggtatttactttgaacgagggttctgtctcttcccgtaacggggatttgtaccataggttaataccttgctgcttgacgggagaatatcccaaactgtacagaaaatccgctatcctgatttgttttgctgtctgtatatccataataagatgagtgtttgaataatggttggaatatttatttctcttttcgcccgtacttttttatgaagtacggtctgtataatcacttcactttatcttcgtatatataggatacggtaataaagtgaagcgcttttctattccctacaaccgcttcgctttattcttaatatatagacctgccgaataaagtgaagtgattacaggttatacggtctaatagtgaaagtccggcttgaacgtgtatttcctgccgttctcctgtactatcatccgtttgttccggagcatggtgataagtgataccgctttttgatggttcagttttacacctaccgacatatatgacttgattaaggaggtttccagatccttgtagccgtattcctctttcagtccgaaagccgcttccagtgctatgcggtgctgctgttcgctaatatgtctgtaagggtcaaacttttcctcttccggtcttccgggtttcttcgcttcgggtctgtacccctctatgagttcaggcaatgcattgtcgttgatacggaaagcgaaaggctcgaaatccattgcacggatgtgcatggctgaaacattgcttatatccccgttgctcttgtccttttccaccagcagaacggtttccgccttgttgttcagctccgtaccgatatgccctcttgcgttttcatcgcctttgttctggtggagtatcgtatggatgtgtatctgcctgtcatccgtccactgcatcagtttggatataatgcgtgtcgattctcccggactgttgatgtcatataccatatcacggatgccgtctatgattacaagccctatgtccggtgtattatagatagcctgttcgacaatcctgatacgctgttcgggcgtgtatttcctcaaagcgagaaactccagatgttcattgtccctgtcatcaggaagaccagcaagccgtaaaatacgtttcatgactttcagacagtgataatggctttgttccgtgtccacataaagaatcttccttttttcttccggtagttccgcaacataccgcagtaccgtaccgtttttcaatgcggcggctacgatagccgatacattgaaagtctttttactcttggctttgccgatggatgcactgaaattgcccagtgtaccaatgaccgaaccttgcacttttagaatctcaggtgctttttcgtagattttcgacagactcaggcgtgaagcttgccaaaggattattgcctgttctgccgaaatctcctttatttctttcatatagtccataagcatacctcccattatttccgtcctcctgttttcttcccggcaagctcaagagccaattccgcatctacgataatcttgcgccctatctgggtaatcgccttgtctatcttaccgcttttctttatgcggttggcagtgggcagactgcacccgaacagtttggctataccgagtattccgtacacatacttcttttccgtgtctgtaacgggttgcggcaatgcttcggcctgacctgaagcgtgcttactcaggaatatgaattcttcgcctgtcatctgccagacgggttttgataataattcttggatatttgtcatcgtccaatctatttagtcgttaaacaatcagccctgcgcactggctgttatttctgttctcgaacgatgcaaaattaggtagggttatgagtggtaaggatggggacggtacaaactgaatatcattgtatcttattgaatatcagaaaataaaaataccactcaaaaattattttgagtggtaaaagtggaactttcgtaaagtatcaggatatattacggattatctgaatatatgttccatttccttggcgaaattttggttgctgtcactggggaaatctgaaacaggctccttgtacttggatttgtagtagctgtcgtcaatatccagcagtttcagtattctgtctttccatttgtccctgtcctgtttggagagtttctcgctcatcaggaatatcagatagcatacacgtattttctctctcggttttattttcagcttacagttgcaggggtgaagattcatattggcatagaaatccagtgcggaaatttcttcgaactgttctcctatgcacacctcatgaatgagcgaaagtaatttcatgctgaaatattcctgttgttcttctgtcgtttcctgctgactgattggctcgcttgatttattctcttgctttccgtcaggaatgtatttcttcaatatatccagaaaaaggcagctttgacggtatatgtccgcacaacagttcttcatgtattggaatgcctctgttcttgcagccttttgctgatcatagagtttgttcagtttggctttttccctgtcatattcagccttgcagcgttcatattctttctctgcctgtttttcctcttcggctgtatgctccctgtaaccaatggaatcatacctgttgttggcttcattcagcggcttgctcagacttcttgtaacatccagctgggcttcaatttcctgagaatacctttccatgtgctgatagcaagcacgttctatggctctgtcacttaacgggcgtatctcataagcctgtatgctcttttctatttcagttttcaggctgttgagtatcaaggtgtattgctctttttgcttgtcaagcaccagttcaaggatagcggcttcaaaggatttcatgtcattatactcctgatagaaatccgatatgaatttctgcctgtcaaaagaaaaagcgtaattatctatatagtctctgtatattctgttgagttctccatattggggaatcatcgtctgtatctttcctgccatatactttatattatgggttcttgtccttgtcaaggaataaggtcagttcttcttccacttcttctatactcggtagggcagatttcagattttcgggtactgccttgctcaattgatagtcgctgatacctatcggctggtcatatccagccaaggcatattgtgccacgacctcatccttacccctgcacagcaaaagaccgatggtcttgttatcattttctcccctcagtttatcatctacaacattgatatagaaatttaactgccctgcatattccggtttgaatggcgttgctttcaattccacgacaacataggcatggagcttgatattatataggatcaggtcggcgaaaaagtcactgtccccaatctggaaatgtttttgtctggcaacaaaagcaaagccgttacccatttccagcaagtaacgggttacatgctttaccaactgttcttctatatccctttcgtcagccttttcctttgctcctgccaagtcaaagatatacgggtcttttaacagataattggcaagatcgctttgaggtgccggaagtgtggcagtgaagttgtttaccttgttactcttgatttgtctgtcatacagattactttcaatctgcattttcagcacattactgctccaacccatttctacagattgtttcatataccaataccttacgcccaatggtagcggattattgagtatgaccatatggcttgcccaatttattcttgcaatcggtgacgccaagaataaatcttctatatcctctatttttattttatagatggttgctactgtttttgctacattctgaaattgcgcaggaacctcctgcgtaatttctaaagattgattatcagctgattgtatttgcgcagtaagctcctgcgtaaattgtccgctattgagcttaaggacttcattagtaatgttttgaatatttgggaccgacagtattgaatctgcttcaataaaactacgaagtacatttaacggatataaacgggcaaactggcacatataagtaagattacgttccgaatatcccttcttttcaggataattgaatctgattgcctgtgccaattttttgataattttaccaccccacccatgtaggtgttggtggtacagtatataattccccattttccagtaatggaacaacatctgggcattggctgcggtaatgagtcggacttgtgcctgttctatttccgaaccgacagcatggacaaaggcatcaaaatgacctttctttatattatgttcgttgttattttccatatcactaactattacttaacaaagataactctaataatggataatctgtgaaactgactgatacttttagagttggttaaacttgttcattgcattggccttaatatcgtctgctatgtcaatgtaaggcttcatggctttataatcactgtgccctgtccatttcattacaacctgtgcaggaataccgagagccagtgcattacagatgaatgtccttcttcctgcatgtgtgctgagtaatgcgtatttcggtgtaacttcatctatacgttcatttcctttgtagtaggtttcacgtataggttcgttaatttctgccagttctcccagttctttcagataatcattcattttctgattgctgataacaggcaatgccatgtggttttcaaaatggatgtccttgtatttttcaagtatggctttactgtacttgttcagttcaatactcagactatctgccgttttaacggtggtgacttctatatggtcggacttgacatcacttctctttaggttacgaacatctgaataacgcagactggtaaagcaacagaacaggaaaacatcccggacacgttccagatactgtttgtctttgggtatctgatagtcttttagtctgttcaactcttcccatgtcaggaagattaccttcttgggggtggttttcaatttcggtttgaacgtatcgtatgctatattctggtgatagtctttcttgaagctccatcgcaggaaccatttgaggaatcccatttgtttaccgatggtactgtttctcatgtcttttttgtcacgcaggaaattgatatactcgttcaatccgaactcatcgaaatattcaaaggtcacatcttccttgaactccttgaggtgatttttaacggctgcaaacttttcgtatgtggattcagtccagttattctgattgccgcattcttttacaaattcatcgaacacctcccaaaaacttatctgtgcttcttcctgctgttcttcgttggcattcttcatccgcaggttgaatgcatcctttagttgttgggtagttggcatggtttcctgtacctcaaactccttgaacacattttgaatttcggcatagtatttcagcagatcggcattgatttcagatgcactttgctttaatttgttggtacacccgttctttactcgctgcttgtcggaatcccatttggctacatcgatgcggtaacccgttgtaaactcaatgcgctggcttgcgtatatgacgcgcatacggatggggacattctccacaattggcacaccgttctttttccggctttccaatgcaaaaatgatgtttcgtttgatattcataattgggtgcgtttgaaattctacacccaaatatacacccaatatttggaatagcaaaagatattcagaaagatttagatttactatgtattccaaattgtgtgtgattatcagtaatttgcaattttatgatatttcttgaatgtataggttcgagagcctgtctctccgcaaaagtagaaaagttaaagttgtagattcttgaatttgaacaattcaagaatttttctttttccagcacttatctgtatggatgataatgcggaaagtggtgaatacaaaaggtgaataagaaacagtacccatagttcaggcagattgattttataatggatgtaaaaacaatctaatcgggatattattatggatataaattgattgacgcaaaggctggaaaagtatagcttacgctcaatgaatcatttatgaaggatccctttcaaaatccttcacgacaacacattgaaaaacaatgtattgtgtaaatatgaaggatttgaaggatttcccggtgtttttttattttaataggttttatgataactccaatcccagtgcttcttttaatttcagcagattcgggtttttcttactcatcatctggaaacgttccacgtggctgtaagcacggatgttctcggtaggggcactgacacgtaccgtcatggtgattttccggttgtgcagacgttcgcgtaagtgattctgaaccgatggtatcaattgtaccatatatttttctaccatatcattgtctactgtcacttcaaaagtcgtgtcattcaacaaatgcggatgcatgttcatcattcgtgctgagttagccttctcttctttgggcagggcggctgcaaattcacgccagtaatagtccagatctttttcattgaaaatataatcttcgtatgtggcatcgttttggacagcggtgcttgccgcttttgcttcttgcttctccgcggcttgctgttcgtgcaaaggacggcgcagggatataccgagtgagcccgccttgaacaccgggatttttttctcttctctggtctgaggcagcgggcttggacggtttgcgttcatactgccggctgtacttgtaccctgtagctgaggagcggcagttgctgcggtctgtgcagcggcagttttagcctgaggctgtgactgcgtggcgtctgtggaagccgcttgctgcgtaaataggggttttaatatcttcttagggccacgcccaccacttgcatcgtcggcatcgggcagagtgagttgggcgcattgaatcagtgtcagttctaccagcagacgtttgtttttgcttgcacgatagttcaggtcacaatcattgcatagcttcatggcacggtacaggaatttctggtcgcatttttgtgcttgttctttatagcggtcgcggataccggcgcctacttccagcaattgcagggtggaagggtccttgctcaccagcaaatcccggaaatgagaggatagtccggtgatgaaatgactgccgtcaaatccttttttcaatacgtcgttaaaaagcagcatggattcgggaactttgttttcaagcaacaaatcggtcagcttgaaataatattcgtaatccaagacattcaggttttcaatcacacttttgtaagtgatgttcccacctgtgaagctgactacttggtcgaagatggaaagagcgtcgcgcataccaccgtcggctttctgtgcgatgacagtcagggcttcgggttcggcgttgatatgttccagtttggcaacgtattgcagatggtcgatagtgtctttgatgccgatgcggttgaagtcataaatctggcaacggctcagaatagtcggcagtatcttatgcttttccgttgtggcaaggatgaagatggcatgatgaggcggttcttccaatgttttcagaaaagcattgaaggcggcttgcgacaacatgtggacctcatcaatgatatataccttgtacttgccgatttgtggcgggatacgtacctgctcaatcagcgaacggatatcttctaccgagttgttgctggcggcatccagctcatgtatgttgtaagaacgctgttcgttgaatgccagacaagactcacactgattgcaggcttcgccttcggcagtgggggtctggcagttgatggttttggcaaagatacgtgcacacgttgtttttcccactccacgcggtccgcagaacaggtaggcatgtgccagcttgccggtggcaatagcattttttaaggtgatggtcaacgcgcgttgtcccacaaccgattcgaatgtagcgggacgatattttcgtgccgatacgatataattttccataagcggagttcttttttctaatatgagttctgcaaaagtacataaattatccgtttttatgggtaggattgcttgaaatatttctatctttgcaaaaatcaaaaaagggattctttgtatgagcaaattgctgactatttggaactacatccggcgccataagtatatgattacggtgctgatctttattgtagttattggttttctggatgagaacagcttgattcagcgggtaaagcatcgcagtgagatcagcgcgctgaatagtgagatagagaaatatagaaagcaatatgaggaagatacggagaaactgaaggaactgaccacgaatcctgaggctttggagaaaatagcacgcgagaagtatttgatgaagaagcccgacgaggatatttttgtgtttgaagaatgagtaaatcttataatataatttcgatggcaggggcagtcctgctgctggcaggtgcggtgttgcaaatcacccggtgggagcttgcgccttatctgtatacgctgggtgctgtgatgttcggctatgtgcaggtcatggggaatcgttatgatggaaggaattttatcatcaagcgtttgcgtagacagcagattttcggggctgtcgcactggtctttacaggagtattgatgtttaccatgaaacgtaacgaatggattgtttgtctttccattgccgctgtcctggaactttatacggctttccgtattccgcaggagttggagaaggaaaaacgttaagaaaccagtgtcatttcttgggatattcagtaaatgtctctaaaaaataagatggcatatgaagatgatagggcatgaccatttcatatgccattcttattgtcatttttccgtgctttctcacatacttctatccgacaggacatgacgttccggaagaagtctgatgacctcttctgattctgtgagtaaaatcatatcatgctgctttagctgttttgtttctgattttttctatcatcagtatggcatttgccgtatgtattccaaagaaaatccacagtatttccgtcttcctgtttctggcctttatccttgagagcgagtaatgttgcttttgagtgccgaagcttccttcaagccgtgttgccctttcttttgagagttcgcttctaagcaccttcctcaaaggctcatctttggccgcccttcccttgcgcacaaaggatgtggatatcccatattttgtacagaactttctgttggcattattggcatatatggaatcggcagccacacatcttacccttacattcataagcttctgctgcatacggatacagtccttcaagcgtataccctcattgaatgccttgaacgagaggtgttcgatgaacgatatgccgtctatctgtatattattgacctttgcaccgaactcgacggacttggtttccttgcctctgacgatgggacgtacataatgacggtcaatgctgacgatgcggtcactgactttccgcccttcaaacatttccttttcttgtacaagcacctttctgatgatggaaagacgcttatgataatcctgggtatatcggagtaaagcaccgtactcgctatggatcccatccctttgactgaggagcttttcaagaagcttgatcatacggcgcttaagcattcttgtccttgaagctctcctctttcttttcttgcagtaggacagataggattccgccacattcctgtatttgttgcgcggacgccttatgcccagctccctgcaatgccggcatatatgcctgtagagccattcgaggctttcccaaaggagtttcatgtccgtaggaaaacgcatgtggctttcatagcatgtggcatcggtcatgcagacgtgaaggttatcaagataaggtttccagtgtgaagccaggagctcctggaaagaatcaatgtcaaggcgggatgctatctcattacggatggcactgactatcttgaagttggttatgggaagggacgggggaatcataattccacagaaaatctggtagtgtatgttcccgttcagatgttccaccagttgcctgtcggagaatccggtgtatgccttcaggaccataagggcgatctttgcggaaggactgaatctgttcctgcgtcccaggcgccggtccgacaggccggcggcttttgccatacattcaaacggaaagaccgaatgaagcttgccaagctcactctcattaaaactcttgcggtatttttccagaatatcaaattctgtaaaacccaaagtagggtgaatttctgaaatattcactatctttgccatatcttattagtttggatatttcccccgttttggccgtcaaatcttattttcgggggaatacctaaagatacaaaaaagccaactaattcgcaatactttgtgtatgaattagttggctgattttgtaatatttaatgaatgtcccatttcttgtccgcgtttatagaggcttatcttgtgaaaaataggagaacgcggacgacacttgttacgtgtggtccgcgttctaaaaaatagttgtccggtattgttattccacaatggtcatttcatctaccaagtgtttcgctcctgcaaacttatcaataataaataaggtatagcggatatccacacaggctgcacgttgtaactggggattgtaagcaatgtcaccggtcagtccttcgtagttgcggtcaaagccggtaccgatcaattcccctttgttattgaaaacgggggagccggaattacctcctgtattgtctgttcctgtaacaaaacagatgggcatttcaccatttttcatggcatagcgcccgaagtctttcttgttatacaagtccttcagtttggccggaaccacgaattcatagttgttcggatcctctttttccatcactcctttcaacgtggtgtaatagttgtattccataccgtctttggggctgtatgaacctactttaccataagtgaaacgtaacgtggagttggcatccggataaataggagtgccttcatgctgtttcagcttcatcataccctctacccaggttttatgggccagattataagcatcggtttcggctttcatggctgcatcggtatctgcataaccttggtctactgatttggcatattgcaccatcaggtcattttccaatgtcttggcatccggctttgccacaaagttgtcaaaggcttcacggcttcggaagatggatgtatcaaaacaagcatcgacaaaggcgtcaatgtttcctttgaattctttgtctattactttaaagatgctgatgcgctgttcggccggaattaattctgcgtaagttttcagcaaagctttggaaactttacggtctatttcgggattatagtctttattgaaaaatttatcggcttgtttgatcagtgtgcttaatgcatgatccagcggattgatttctttagtagcatgaggtactttatatccttttttcaatgcttgcaggactttgtctgtggaaggaatcttatagaattccgttcccagtttgcaaacttcgtaaatggcttgctgatgatatacggcatcccggcgtttgctcacgatttcccggatagcatcgaaggctttctggtaggcgtcagtacccgtctcacgtccgtaagccagaagcttttcctgttgtttctttttcgtatcaagtactttcagctgaaccagtccttcgttcataccgatagcattcttccagtaattggctgacgaggcgtatttgctggcatactggatgcgtactttatcacttttcagcatctcttccagcagattattcaatcgtacggtgcggacggtcttacgcatgaagttggtagtctgcatacgttcttccacttcgtccgaaatcatgtatcgccagttgcgtccgggaaatcccattacgaaagtgaagtctccctctttgactcctcccaggttgatggtcagatgttttttcaccttcaagggtacattgctttcgttatagtcagcaggtttaccgtcgggtgttgcataaatgcggaacatggagaaatcgccacagtgacggggccacatccagttatcggtgtcagctccgaactttccgatggaggaaggaggagcgcctaccatacggacgtctttatagatggtctttataaacaagtaatagcggttggctccgtagaaaggctttagttccaaagcggtgaacggagtgatctctatattttcttgttcggcaaaacgtttggctactttgctcagataggagggggacaggtagttcagtccttccgggtcctcatctttggccagttgttcctttacataaggagtgacgtccagaattctgtctatgaaggtgacagtcagccccttgcagggaagttcttctttgcggctcatagcccagaagccgtcagtcagatagtcgtgttctaccgaactgtgttgctggatatagctgtaaccgcaatgatgattggtcagcacaagaccttcggcagaaatgatttcaccggtacaaccacctccgaaatgcactacagcatctttcaggctgatgctgtccggacaatatactttatcaatgctgatatccagtcccatatcatacatggtggctgcattctgttctttcagatcagtcagcatccacatcccctcgtcggcatggccggcaagggttgtgaaagtaaatagcgagagtaatagtatctttttcattattcaacaatagtcatttcgtcaatcaggtgtttgcatccgcccaatttgtcgatgatgaataatacataacgtatatccactgcgatacaacgctgtaagttgttgtcgaaattaatgtcaccactcagtgattcccagttgccgtcaaaagcggcaccgatgagttcgccgttaccgttgatgacgggagaacctgaattaccgccggtaatatcattggtagtcaggaaacaagcaggcatatcaccgttgggcaatgcataacgtccgaaatcttttgtttcatacaattctttcagtttggcgggaacaacaaattccggattggtaggatcctctttttccatgacacctttcagcgtagtgtagtatttatagtgtacgccgtctttgggattgtatgatttcacattgccgtatgtcagacggatggtgaagttggcatccggagctttgggttccggtgaatacatttcacacagaccgcgtacataagttttgtgtaataaatccatgcctttcatcgattcagccagttcgtttcccagcttgtccatcaagtcatatttagcccgtacgtatgcagtcataggatctttttctatggctttcacggtaggtttcttgatgaatttattgaaattcgcttcgttggagaagatggaattgtcataacaatggtctacgtatgcgtcatagttacctttaaaatccttctggatggtagtatagaaggcaggtaaagcattggcaggaaccatttcggcatacaggggcaacagagctttggccactttgcggtctacttcgtgatcgtagtctttgttatgtatatcggcatatacttttttcagcgtttcaatatttttattaatcgcttctttatctttatttttgattgcgtctttcagcttgtccagaatcagataaggagtgccgaattctatacctccttgaaagacttcacggaaacaggtgtagttataaagaataggattactcttttcgatggcggcatcaatttcgctgactactttttcataatcagtgttgcctttggctttagcaaatgctgcgaacttggcttcctgttctgcttttgtttccaataccttattgtcgataatggctttattcatgccgatagagtttttccaatagttgctggaacctgcatatttgctggcgtattggatacgtactttgtcactggcagccatttctttcttcagtacatcctgacgcacaccacgtatgcggatacggggttcgttggtggaatgcatccgttgtttcacttcactttgagtcagatagcggttggtgcttccggggaatcccataatcatggcatagtcaccctcgttaatacctttcagtgagatagccagatgctttttggctttcagaggaacattgttttcattatattctgccggttcgccgttggcatccgcataaatgcggaagacggaaaagtcgcaagtatggcggggccacatccagttgtctgtttcaccaccgaatttaccgatggatgaaggcggagcggcaaccatgcgtacgtcgctgtaggttttcagataaatcagatagaatttattgcctgcatagaaaggcagagcttgtgcgctgatacccgcttttccgttcaggtcactggctttcagttcctcgtcggccagttttttcaggaagtcgtattcaaaggtttcctcttcttttacttcgcctgattttactttattgtttactttatctgtgacatcgacaatgcgttctacaaatttgaacttcaatcccggagtcggtagctcttctttgcggctttttgcccaaaaaccgtcagtcaggtagtcatgttctaccgagctatgttgctgtatcgctccgtagccacagtggtggttggtcaggatcagtccgtccggtgagatgatttcaccggtacatcctcctccgaaaatgcctactgcatcttttaatgaaacgcggttcgggttataaatgtcgtctgcttccagcagtaagccttgtgctttcatgcggtctgccaaatgctgctcttgcatcagttgcaacagccacataccttcgtctgccttcgacggcaagaatgctacacacatcaatgcgagcaataaaagtttgaattttttcatgttgtgtactaattgttatttctttatccttatatcggttacaaaaatagaaaaaaagagggaactttgcactataaattgccttctcggtaataatcttctatttagttttaaattttaataaaatatttttgtcactaaattatagattgtacctttgtatgcgaaaaatagtaatggggcgtagataagcatgaataaactttttttctctgtggtatctttattggcttttacttcatgtgccagtgagtataagatagaaggtagttcttctgtttctcgtctggatgggaaaatgctatttgtaaaagttcctagtggagaccggatgctgagtattgattcggcagaggtaattcatggaatgttcaagatggaaggtataaccgattctacttcaatggcatccttgtatatggatgatgagagcatcatgccttttgttattgaaaaagggaaaatatccatcagtattgataatgcccgtattgtagttaccggaactccgttgaatgatcgtctgtatgattttgtgggaaaaaagacttctttggatgacagggcatacgagttggagcgtcaggagagccgtatgattatggatggaaaagcaccggatgaaattcaacgtgagataacgagagaacgtgagaaactggctgctgaaatgaatgcattggctaaggagtttatccagaagaattatgataatgtattgggaccgggtgttttcattatgttgtgcagcaattttccttatcctgtcatgactcccttgattgaggaaattatagaggaggctcctgaccgatttaaaaataactccttggtaaaggattatgtgacagtagcccgttcgaatatggaaaaattaaaagctccccattaatgaggagcctttttttatctgtcttggtctggattgtctatttttccttgatatttttcaggtaagtctttctcaatttccctgtaagcctcttccatggttgctttgatgttttccattccctggctttgcggataaatgggcttatgtacgactaatgtcataggatgccaggatacaaaaccgccggtacggggaagaatattaaaggagccgataatagtgagtggtactacgggaagttgcaaatcatctgccagttggaaagcacctttcttaaaatatcccatgtgcccggtaaaagtacgtgcaccttcgggaaataccactagagaagttccatcctgtagtacgtgacgggcatgttctatggtttctattaccttcttgggaccggatttatcaacgaatatatgtccggcagcttcacaggctttgccgacgaaaggcattttgcgcagactttttttcatcatccatttaaagtttcgtcccagaaaaccataaatcaggaagatatcgaaagagccttgatgattggctacaaacacataggatgtttttttaagtacttccggatgtcctactaccttgacaggaataagtaatacatagcagaaaagctgtgaccatatttttcccggataatatccccaaaaatgcggattgcctatccatgaaccaataatggtaactattgctgtaagtatggttaataccagcaaaatgggaagtgctatgaatagttggtataaaatatatagtactttcatttgtctgaattttagttgtacaaagatagaaaaactattttatattttatgtaacgtgattactgtaatttccggccatgctccaaggcgcatagggaacatcaggtagcccaaaccaatattgacaaacaaggattgttttccttcctggtataaaccgttgtgttcgggatatacgaatttagcaggagagaagccaaacaggctgaactgcatttcatgggtgtggcctgaaagcattagctgtacatcactttccggcaagacttctctgtgccaatgagtggggtcatggctcattaatattttatacattccttccgttccttttaatgctttctgcagatctccataattgggaaatgggggatttccgctgttctctacacctgccagggctatactgtctccatgatgatgtagaatgacatgatcgttattgagtattttccatcccatggcagcctgtttggatttcaagctgttcaggttggcttcttgagcttcttccgtttcccattttatataaggggaatagtcatggttgcctaaaacggaatacactccgtcttttccttttatctgttctagaatagggataaattcgtccaattccgttgccacgttattgaccaggtcacctgtaaaaagtaccaggtcggcatgttgtgcattaataaggtttacagccttctgtaaagcagcaccgttgccagtccagctgccggaatggatatcagatatttgtacaatgcggtagccgtcaaagccgctgggaagttcatcggaactgatggttacctccctgatttgaaaatgctgttttccttcggttgctccatatattacatatattaacgaggctaaagccaatcctcctgctacatatcctccatacagttttttgccggagatgatatataggagcttcataaacaggataacaatgacgaaaagtgccttgggtacggagaaacaaagaaaaatcaataagaaattgctaagtcgctgcatggaatccggacgtggctcatgtatagaaaagactaatgtcattcccaataaaagaaacagactgggaagccaataagcccaatgtgtccatttttgggaaacacggcgtatatatgccttgtatatatacatatcgggcaatatcagtagcagtagaaaaaacagaaataactttatcagcatcataatttattcgttttttatagattggcggcgagaaactttttagtttcttctatactcatgccccggcgggcggcgtaatctgccaattggtcttcacctatttttccgatggagaaatagcgggaagccggatgggcaaacatgagtccgcatacagaggcatggggcttcatcataccattctcggtcaatgaaattcctatttgcttcatatccagcaactcgtctaataggaaattgacggattggtcgggcaaggaaggataacctacggcaggacgtatcccttgatatttttcattatgcaggtcttttacgcttaggttttcatcaggtgcatatccccaaagttttttgcgtacatcttcgtgcagtttttcggcagtagcttccgccagtctgtcggacaatgtttgcactaacatacgtttgtaatcgtcttctgcatagagccgctccatttctgcatctaccgtagtggcgaatgctcctattttgtctgtgatacccgatgataatggacgcacaaagtcactcagacataaaaacgggtcatcttctttcaattttgctgtttgttgacgcaaaagcggaaaacgcttgctgttcagcagcagatcatctccgtcggcattggcatccatgatattgaccactccgtgggtctgatacgctgcatccagttcattcaacatccgatttgcctctttgaaaagctgcatggcttcactggctttcggacggtcttcttccgcaaaaccggtgagccacatggcccggcatgaatcacatccatgtatgtccgcaatggcggcaaacttgggttgaaagccccatgcatggaaaaaataaatccagttaatgtattcgcttacttcgtgaatcttgtaatttacaatcatcttttaaaccttaattcttgtccgcgatgactttggtctaccttgttgtcactgtaaaccagatcaccattgacgaatgttttttctacccgtgtgtggaatttctgtccttccatcggagtccatccgcatttgcttaaaacgcagtcggcagttacagtccattcatgatccggatttaccaatacgaggtcggcttgataaccggggcggatgtagcctcgtctttcaatatgataaagttcggccggtgcatggcacattttctgaaccagttgctctatgcttaatatgccttcgcgtactaattccatgatagctactaatgaaaactgtatcatcggcatacccgatacggctttcaatgctcccccttccttttctttcagtaagtgaggggcatggtcggtacctattacatctatcagattggtagacaatgctttgcgtaaagcattccggtcttctgaagttttgatggacggattgcacttgatacgtcctttcaatgtttcataatctttgtcatagaagtatagatgtgacacgcaagcttccgccgtaatctttttttcactcaggggtttgtcttcaagcaaatccagttcttgtgcggtgctgatgtgcaggatgtgcaggcgggcattgttttcttttgccagccggatggccagtgaggaagaatatgcacatgcttccgcactacgtatctgcggatggtattttatatcaggatcttctccatatttttctttgaaggctgttgtattggcactgattatagattgttcttcacaatgtgctgcaatcagcatacctgcattggcaaatacttttctaagtacttccatgcggtctaccaacatatttcccgtgctggctcccataaataatttaacaccgcatacccggcttttatctagtgtggggagtacatccgcattcgtattggttgctccgaaatagaatgaatagtttacgatgcttttggttgccgcatccgcaaacttggcattcaaagcttccagggtcgtagtttgcggagtggtgttgggcatgtccataaaactggtgacgccacctgctgccgccgctgtgctttcagtatgtatgtcggctttatgagtcagtcccgggtcacggaagtgtacatgatcgtctattactcccggcatcagataatagcctttcgcatctattatttctccacaaggctgggagggaactgtttcttctgccagcacttcagctatgacttcattctcaatcactatcgaaccgtgaaaaatcttgccttcattcacaatccgtgcattctttatccatgtacgtttcatactgttttcttttgcgggtatttgcggaaccagctacccagttttaattgaatgactcctaatacagcttcaccgaagatacttccgttcatttttgaagtacctaattcgcgattgacaaaaatcacaggaacttcggctatcttgaatccgcacttgtaagcagtgaacttcatctcaatctggaatgcatatcctttaaaacggatgccatccagaccgattgtttccaagacttcacggcgatagcatttaaatccggcggtagtatcatgtatgggtaaccctgtgataatccgtacatatttggaggcgaagtaggacatcagcacacgccccatcggccagttcactacattcacaccactgacatagcgtgaaccgatagctacatcatagccttcaacggcacatttgttatacagccttggcaggtcattcggattatgactgaagtcagcatccatttcaaatacaaaatcatattgatgctctatcgcccatttgaatccggcaatgtaagcagtacccagtcctaatttacctttacgctcaatcatgaaaagacggtcggggaattctgtttgcagtttacggacaatggttgccgtgccgtctggtgagttatcttcaataatcaatatgtggaagaacttttccagtccgaatacagcccggataatgttctctatattttccttttcgttataggtgggtataataataatactatcggatttctccatacattttttgtattagctgaataaatatcatacaaaagtaactattatattaacactcccgtcagaatttaattttattaattaaaaaaagaggattacccctgcttggcgcacggataatccccctatttaacagaatagtttagaaatctttagaatgccacaccaaggcggaaaccgaaattgtttaatttatccatatcatagttaaatacggttcccttgttggtagagtagctgtagaatgctgccagatggaagccgatactgtttgtccaggggtagatattcacaccgacttctggtgatacatagaaaccccaagtgttgtctttcacttcgtaaatgtaaaagtcactggacattttggtatagttggcacccagcttcaatccgatataaggttggcatgcaccgtcactgaagcgatagtgtgttgcgaaaccgaaaggcaactgaaatacggaatgttgctggtcggttgtcagggctgccgagttgctgattggtagtgtctgacgtgaaatatactcattattggtatgataattgataaaggcaccgattgacaaatccggcagtacataatatccaccttcgaagttcataccccaaccgcttgctttgtttgcaaagttattgctgataggagcgttgaactgccagtctacattgaaataggtaaacggagttacctgtgcttttgccggcagggcaaaggctatggcgatagcggctaccgccatcagtctgagagttaaatattttatagttttcatatttcctttttattttaaatgaatacttgtttcacttacatttattttttcagataaggactctgagtgaatgcctggttgatggcagtagttgtacggtttacattcaaactgccacttccgcccagcaacccgctgatgtatgcattccagacaacagttaatttttctttttgtccttccggagcattttttaaattaatcatgtcggccagcaatgaaccggtgctatagctgtaagtgataggatagggatagtaccatccacctccccaattgccgccccagtagccgggataccaataaccgggataatagccccaccagggtccgtcattatagtaaccgtggaaataataagtacttgctacgtagcttacctgtaggccgaggtcggcttcgtctttattagctgcggtgtagccggcagcgttcatcttagtcttgaatgcattgatgatgatctgtgcattctcgtccttccagtattcagggtctttcttgtcaccgatgatcaggatgctgtcggggatataataagtactgaagtcattgaacttagtactagtgtcatgactggtgaataccagatactcattgtccaatttgtccatgtccgggtctttctcgcaagataccaaggcaaagaccgccagtaggataggaattaattttttcatgtcaagtttttgtttaagttaatactaattgtttttcgtctagtttctctcatacaacggccagcttatgtttttgttcactaacagtctgttctttagtgaatttttttgcagccaggttaattagagtttcttttttaaagtgtaatttagtttagaaacagctttcttgaagtccttgccaatcattgtcagtgcactgtcaccctctgccagaaagtttgtcttttcgtgtcccggagtagcggaaattaattgataaacgatagcggtgctgtcattaggaattccaataatagttacaactgtaccactgtcggtaaatgcctggttaccatcttttgttcctaaataagtggtcgtcagattgtacgtgcccagtgagtcttggcctgcctcctgaagtgtcagttgatagttgataccttcggcatcggcagctggcagaataccttcatagctatatgtttgtaattcacccagtgtgctgtcgttcacagcgaaaatagagtcactttcactttcggctattatttcagcacttttgtttcctttagagccacaggaaacaatcatggcagccaaagctgctgcaataaatacttttttcattgttaagtcaggtttttaatggttatttgggtacataacatttgttatgcccgttttgtttttaataagttctcttttcagaaaaaacaagactatgtttaaaatgcattaaacacggtctttaataaatagggcgttgtatctggataaatcggactaccgtagccgtatgccgttcatacttcttcgaatcagtgagttatagataatttttccttttgatacttgttcttctgtttgtggcaggtcgggcatacttcctgtcgtaatataagctatagtgttcttcaataaatactctttggtgtctcccagtgggtagagaggggagatgagattacgttcgctcaatgtgaaatcgggagtgattccatttacatagttggcttgtcctgccgagttgagaacgtatgccacaaccggccataaaataaagttgtaacgctcatcttggtatggttccatggctacatttttgccaacagtcgtttcacctattaccactacattttctgtacctatatatggacggagacaatttatgactgcttctgaggccgatgcagtaaatttgcttgtcagtacgtagagcttgcttaagttcaagttttcggaagcaagtcctgtattgagagggaaatctattttttgcgggtcactgatgtcattatacaaagttgtgcaaaatactttccctagatctgccgcaggtgccagataacttcctaaatctgtggcacaactcaaataaccaccgggattgtagcgtaagtccagaataaaagcatcgggtgactgtcccttgaaccgggcgaatatctgtttcatctgttccctgtattctgtatctgttgcctggttattggggcctgtactgaattcattgtagaccatataggctatttttttttcggatacttcatatactgtatctatatagaacggattcaattctacggggcgtgatgccgctactttgactgtatctgttgcaatccagctggaattgccttcctcatcaaaaaccaagctttctctggcgaaagttgtattgccgccttccatcagatatccgtaattattgttggtcagttcttctttgccaatggctgatatccagttccctcgttccaatccggcttctgaggccggtgaattgggcagtacgaataaaatacgggcaaatacgtgtgatgagattccggtgggatcggtcattaattcaaaatcaaatccgtaagtagaagtacgttgcaggtaggaacgtgccgcatcggaagcgtcctttatttctatatacgaatacgggtctccttttccgttttgtgccttggtataaaccaatttttgcaggaagtcttccggttcggcaaaatagtccgtttcctttattgccggaatactgtcataccacaaataatgctctttcattatttgttctatccatacattctctccaattaatgcatagtattccccactgcggtcttcgccacatgaagccattataaataaagtggttagaagaaaaaaagtgctccgtatatgcttcataatctaattcctttttcgatctgcaaagctagggattttattttaaagtagggataaggtttggaataaataatccaaaaaacctttatataaaaaagaaatccgccggttaggtcaagcagacttcacggcggacgttcttaattttttatttcttttcagatttccatttgtcagcatattcattcagaattctgcggatactgagtccgattttgatataatctttctcgttcaggttggcaagtgatacacgtacactccattcgggtccgtcgaatccaccaccattcaatacgaccaggcctgtttcattggcaaggcggaatactacgtccaatggattataagttgtctgcagatgttgtacaaattcatctccgtaaaatttcttggcccataccagcatgtctatttctgaataataaccggcccttagtggatcgtcggggagaatgaatcctgtgttgtcccataatgctttcagacgggtatggattaaattaagcatggcatgacgatatgtattttctttgtccagcaatgaaaaagaagcaaagagtgacatctgcatttgttgtggcaaagacaatcctgctgtatggttcaaggctacttgacggctgtctgctaccatacggtcaatgaatttcatgttttctacttgcatactcaagctgccataccgtttggttagttcgctttttcgtttgcggggcagattggcaatcattctgtcgaatacatttttctcatgtaaggcaattacagcaaggcgccaaccggtcgctccgaaatatttggagaaagagtagacacaaattgtgttctgtggcaaatcagccatcaggctgcggaagccgggaacaaaagtaccatatacatcatctgttataatcatcagattgggattccagcgtgttactacgtctttcagggcatctacgcattctttgttcaactgataactgggtggattgcttggattgacaataaacaaggctttgtatttcgtgtctcgcagtttattgatatcttccactttgtattgccaggtatgaagtccttcttcatttagagtacttgcaggaatattgagcacatcataatcgtaacgtgtcaattcgggtatctctatatagggtgtaaagataggaaccatcaatgctatactatctcctttgtgtagcaggaaattttcttccagcgagtcgaatacatagcacatccctgctgttccgccttcggtggcgaataaatcgaatttaccttgcgggggttgcccgttgcacatttcctgattcaggtaatcctgtactagaatttctgtatatttcaagatgcggtcaggcataggatattggtcgcctacaatactttcggtccattcgtgtaccagttcgtccggatcggctgcatgttccatcagcatataattataggtacgtttcaatagatctgtccccgcatttccttcatgctttttcaggtactcctcaaaacgttgggctatgcctgttttttgaggaataccggcaatgccttcgggcatgtccatgacccggcgacactcttcaatgccaaaaccgcccaaggcaaagaatgcttcacgagcctccgttgcaatccagttgggattacctctgcctgcattcagcatgacgtgcgccattttcttcacactttcatctgccatttcaatcaaacggttttttaattcgaagggactgatcttttccaaattcttgtccattcgggcaacgctgcttttatcacttaaatattccataatgtatgagtttagttttttagttgattaataatacaatgaccactccccatatgatgagtagtgtatttcctacggcgtaggtcacggtgtatcctaaagaaggtgtttcgctgcctactgcttcttgtatggcgcccaatgcagcagtggtagtacgggctcctgccgtgcaccccaaagagagggcgggatggaacttgaatacatatttggctagaatcagccctaataatagaggcaaggaggtggccaacgcacctatgataaacaacataggacctacttcttttagtccttgtacaaaactgggtcctgcagaaatgccgactacggcgatgaacatattcaagcctacattattcagcacccataaagaggattccggtatttgtccgaaggtagggcgtttgctgcgccaccagccaaatactaatccggctatcaaggctcctccactagtgctcaggctaataggtactccgccgatatggattgcaagtgctccgatgatacctcccagtaaaatgccgagtcctacaaatatcatatcggtggcattggtggggcggtctatgtatcctagttcttttgcagcagattccacctcttttttcaggccgaccaattccaaagtatctccgcagtcgatagtggtttgtgcaaaaacagggatatcaatgcctgcccgtttgatacggcgtatactgacgccatgcataaagctttgacggcgtatgaagtccaatttttggttggaatatggctttttgtgtatcatgacagggagtacttccacagggaagtcaagcagttggggatcgacgatttcttctccaatccagtcttcttcaccaatggcgaattctcttcttccgctcagtaccacttcgtcccctttttgtaataattgtccgggaataatatcattgacaatggaagctccatgtcgcattctttcaacaaacaatcttttcccttgtgaaataaaataggattctagctggtcaacagtcttgccgttgccaaaccaatcgttctctatgcggtaagcacgaaaaactaccggacggcgggcctgttcaaatccgggctcgtctgcttcactggtacccatccgggtttccaactctttgcaagcggctttcactttttctaatcctcccaacattttaggacctaaagaagagaggacccaggcagagcctgccgtaccgaaaatgtaagttacagcatatgccacgggaatgatattaatcatatcacttttttgggaagaggatatgttgagtccgtttatggtatcttctgctactcctatgacggcagagatagtttgtgctccggccagtaacccggctgcttcaccggcattatatcccattaagatagctaataaccaagtgataatcaaacaacctatacacatgagcgcggcgaatcctacttgaggtaaaccatcttttttcagtccgcgaaagaattgtggtcccactttgtatccgatagcaaaaaggaataaaagaaaaaacacggatttcaccggttcttctattgtaatgttaagctgtcccactaatacccctactagcaatacactggtgacgattcccaaactgaattgttttattttcatttttccaatccagaagcctgcggcgattgtcagaaaaatcgccagttctgaatgctgtctcaaaagatgtataacccattccatatttctttcttattataattgctgtttaaaacagagtgggggtaaagaagttgagttaaaaagctccaaattgtacttagttctaatattttttattttatttgcatagagatgatacttgacttatgaaaataaagttgtttgtaaaatatatttctttgttagttctcttgtttgttgctgatggttgtaaagaaaaaaaagctgacacatatgtgactaaggtcaccgatttaacgggagaggaagaacaagttttgaaattggaatatgatcgtgatggtaaaattataaagtatggggataccccggtaaggtatgagggcgaccagataaccatcggacagatggattgtttgaataccggcaataagctttgcaatgttacgtttcaaataggaaaaggcaaggcgagggagagtagggcccgttgtatgttgaaggtaggagaagaggtttatgaagctgataaacagactgtctatgattataaaggagatactatttttatcaattctgattatcgtgctacttccgattatcgtttcttgaagaaagtgcaaggaaaatatgtttttgatcagttgggacggttgaaggaggtgatgactgtttttactgaggcaaatgatagtgtgtccagttgtcatacttattataattatgataataacatcaactatcaggcgaatctgaatttacaggcttatgtgattgattatgatggggtggatagtttcttctattttttattgaatcttgggcagttgaggaatagaacagccttacctaatgatatcggatattgtatgaatcatggtttaagcacttataatgtgcatgccaattatcgtctggatgatgagaatccggtcaggatagaagttttatataattataccaaacttctatcccgaatagatttatcttataatcctttaaattaattcatcgggaagtataaacaagtctacttcattggcgccttgctttatcaagtctttcttatctatttggtaaaggcggacaaactcatcatgactgtcgcatagttcctgggctttgcgataatattctattgatttttctgtttcattcaggatataatacacatgtcctgcattcatccagtcttccataatgggcttgggctcggatatcagcaagtcgtaatatttcttggcttgttgatggttgccggtaatgaaggaacaccatccgatggcgcgtcgggcattctgtggctttttatccagatactccactttgaagaaataagccagtgcttcatcgtatcgttccagtgccatcaggcattgtcctatttgtagtgccagattcagactgtcgggctgtgcctgttccaccttgttataatattccaaagcttttgggtagtttccctcttttctataacattgtgccaaatggcggttattccatgtattatcagggatcagcagatctgattgcaggtaataatctatcgcttttttataggaaccgattttctgataaatgaaacctgctttctgccataattcggcatttttacgattgtataattcaattgatttatcatagagaattccggcttctgccaagtcgtcgtgtgtgaataggtaatctgccagtttgttgatatactctttgtgtaacaaggcttgagacaatgcttctttattccataagtccagagtgtcctcaaaaatgtcatgtatttcatgtcttcttgaccataatttgaagaaacggtagaggtcatgaatgtattgccggctcacgaattcagcgcgggcttttgattgtgacatctcttttaaacgttctttcagttcttcagaagcttcatgttgtccgttcaattgttgctgcatgagattcctttggctttccggcatttgtaacatggtaaaacaaaaagagtatttgtcggaattgcagaatacatccgaattcatcaaaatgttgagcagagagattttttgttcgtcatttccgagagataatttggcgatatcctgatattggggatcaaaaggatagaaccagtgagaaattttgcggaaaaacgggaattgtttcagctgtgaaaaggtactcatatacacatctgccccggacatttgcagttcacctaattcgcgcaatttatcggtaatgcctgaacggtcaatccattcttcccattccggattatgatcttcggcatcttcatccagtccttccaaattaagtttgggatttttcatcatttcgggaatgatttcttcacgcatcttcttgtctatctttcgggtttcacgggaagattgcaataattgaatctggatatgatgcaggtttttgatgaactcggaattttcattcagttcatttatgcgcgacacggcttcagggtattgaaggatacgcttttcataatagtagcatgttagtgcgatccctgcaatagcccgctgattcagcatggtatcctgatgggtataggcgttcaatagaaacatgaacttgcggatgtcgaatatttgtagcaggctcatggtaacggcgctgaccattatggaaaggtcgttgacttggatcaatagtgagttgaacaaagtttgcgcttcagcatattccgattcactccaccgggtggatacccatattttttcaaataattcgtctacagctgtttcgtgacgttttctcatggcatccatttcttcatttcttttggcctcggtggtatatatcaatggtgctgtagccatatcttctgtatacgcctccagttgcatttgtaattcggcatagctgtgaggagggctttggacaaaagtgcgcattgtgtcataataggctccgtaattttgtgttgcctgtacggctatatggatacggtcggccagttcgtatgccgtgcgtaacattttatggtatatttccaccttattgggatctttcatcccttttgaagtatattgcagcatcaggtcgtatgacgtttgcagggcttctagctcattctttaattgccagtcggaagtatgggtggcatatcctgtcatttgggataatgcttcttttaaccgatattggtctaatagttttatgatttcttcgcgcatattttaaagttctatttgtatgtcttttataaacaaatgcgggcagacttcggttcttggcttatttcagccaggttgcccgtttccatatatattccatcgggccgtgagagtggtgattcatccaccagcggcagaaagagaattgcaagatgaagaaaactattcctgccaggcagctggctgtgataccaaactgattgtgcaatgcaaatccccagttgtagtataacatggaacctactatactttgagtaatataattggtaaggctcatctttccgtatggcgttattttcattaatccgtcgtgtaagtttgtcttgtaaaaagcgaagacgacaccggataccagaatcagcataaatgcaaaattggaaagcgaggtgatgattagtgaaagaggggtcagaatggatttatttgtgataaagtccggtagcatattgcccaatccatataaagggaaaaatgcgacgagtgagcctgcaagtaccttgttccataccttcaagtgctctttcaaaaaaagttccttgcgccctatcagcataccgagcaggaaaagggcggctgtttggaatacccgtccgtgatcccaggcccaggcaaggcttgccaactgtccttcccataaattgacacggatggtttccagaaaattaccattgctttgcactgcaaaagttgcattccagaagctgcgggtggggatggccggagtaacaaattccggatcgagacaggcacgtattacataataaagcggcaatggctggatcaatagcagacatgccaatgcaaatatccatttgtctttcagccggcaagtcagtggcaggatgaaacctactaaagaataaaggaccagcacttccgctgtgaaaaaactggcattgatattacctatcaggaaaagaagaattaaccgccaacaaaaacgtagacggaaatcattgccccgtaggcgttggttgtcatcttgaataaaaaagctaaaaccgaaaagtaaagcgaatatggcgtatgcttttccgccgaacatgaagaataacccgttccaaatggctttgtccgagaagttcagccacgcactttgtccggctgtatcgggaaatgagtagaaattaaaatgttcgatagagtgcaggatgatgattcccatcactgccagtccgcgtagcacatcagctacatctacacgtgcgtgtcctttcaattttgtgtttattgcttttgtttccatggggttatatattagcgtacaaaaataggaaaatcttgaatagttggcaaaaaaaggaggaagtaatcagatatttctttaattttgtccccatcttaaaaaaagatatggatatttcggaattgcaacgtatttatgccggtcatcctaacactaagggactggctgcgttattggaagattcctcagtgaggactattttcctgggaggattacatgcttctgcggcagctttatttgtttcctcctttcttagagagaataaacagacatttgtatttgtactgggtgacttggaggaagcgggttacttttatcatgacctgacacaggtgaacggtgatgagcatattttgttctttccatcctcgtatcgtcgggctgttaaatatgggcagaaagatgcagccaatgagatcctgcgtacggaagtgttgagccgtttacagaaaggcgatccgctatgtgtggtgacttatcccgaagcgttggcggagaaagtggtatcacaagaggtactgatggacaagacgttaaaacttggtgtgggtgagcatgtggacacagagtttatcacggaagtgctggccggttacggattcgagcatgtggattatgtttatgaaccggggcaatatgctgtacgcggtagtattattgacgtcttctcttttgcttccgagtatccttaccgtattgacttttttggtgacgaggtagacagcatccgtacttttgaagtggaaaaccagctttcgaaagagaagaaacagagcattgccatcgtgcccgagctgacgaatgccgccgacaagagcggggtgtctttctttgaattcattcctcgggaaacagttctggcaatgaaagactttctttgggtacgtgaaagaatacaggtagtacgggaggaggcactctctcctcaggcgcttgccgcatacgagggagagaagacggaactgatgaatttggaactgaagctgatagacggggcggaatttacagtacgggctttggatttcaaacggattgaatttggtaacaaacctacaggaactccacaggcaacgttggctttcgatacgacggtccagcctatttttcataagaattttgatttggtaagcacttcattcactgattatcagaaacgaggttacaccttatatatatgtaccgatagtgagaagcaggcaaagcgtctgaaagatatctttgaggagcgtggcgatcatattacgttcattccggtcaacaagactttacatgagggctttacagataatgtattgaaaagctgcttttttacagaccatcagatttttgatcgtttccataaatacaatcttcgtagtgacaaggcgcgtagcggtaaggtggcattgaccttaaaagagttgagccagtttgagccgggtgactttgtggtacatatagatcatggtgtaggccgttttggcggattggtacgcattccgaatggaaatactacccaggaagtgattaaacttatttatcagaatgaggatgtggtatttgtttccattcattccctgcataaaatatccaagtataaagggaaggagggagaaactccccgcctgaacaaattggggaccggtgcgtgggaaaaaatgaaagagcgtaccaagagcaaaatcaaagatatagcccgtgacctgatcagactgtattcgcaacgtaaacaggaaaaaggattctcgtatagtcccgacagttttatgcaacatgaattagaggcgagctttatttatgaggatacccccgaccagttgaaggcgactcaggatgccaaagccgatatggagagcgaccgtcctatggaccgtctggtgtgtggtgatgtgggtttcggaaagactgaagtggctattcgtgctgctttcaaggctgtggctgataacaaacaggtggctgtgctggttcccactacggtgctggcctatcagcactttcagactttcagcgaacggttgaaagattttccatgtaaggtggattatttgagccgtgcccgcagtgcgaaagatgtttccaaaatagtgaaggaactggcggatggaaaaataaatattttggtcggtacacataaaatcatcggtaaaagcgttaagttcaaagatttaggattgctgatcattgatgaggaacagaagttcggagttagtgtgaaagagaagttgcgtcagatgaaagtgaatgtggatacacttactatgaccgctacccccatcccccgtactttgcagttctcgttaatgggcgcccgtgatctttctgttattcagactccgcctcccaaccgttatcccattcagacagaggtgcatacctttaatgaagatatcataacggaagcgatcaattttgaaatgagccgtaacggacaggtgttctttgtcaataaccgcatacagaatctggtagaattggaatccatgatcaagcggaatatacccgattgccgtgtctgcataggtcatggacagatggagcccgaaaagctggagaagattattttcgactttgtgaactatgattatgatgtgctgctggcaaccaccattatcgagagtggtattgatataccgaatgccaatacgattatcatcaaccaggcgcagaattttggattgagtgatttgcaccagatgcgtggacgtgtgggaagaagcaataaaaaagcattctgttatttgttggcgcctccattgacttcactgactcccgaggcaaagcgccgtcttcaagccattgagaatttcagtgatttgggcagcggtatccatatagccatgcaggatttggatatccgtggagcaggaaatatgctgggggcggagcagagtggcttcattgccgatttgggttatgaaacttatcagaagatactggccgaagcggtgaaagagttgaaagaggatgagtttgccgatctttatgcagaggagttgcaggcagcgggagaagagaaaatcagtggcgagaactttgtggatgaatgtcaggtggaaagtgatttggaattgcttttccccaatgagtatatccccagcagcagcgaacgtatgttgctttatcgtgaactggacggattggaattggataaggacctgctcgctttcaaggcacggttggaggaccgtttcggaaaggttcctcccgaagggctggaacttctgcgtatcgtacctttgcgcagattggctaaacggttgggggtggaaaaagtattcttgaaagccggacgaatgactttgttctttatcagtaatcaggaaagtccttattatcaaagtgcggcttttggcaaggtgattgattacatgagcaagaatccgcgttactgcaatttgcgtgagcagaacggcaagcgtagtatggtagtcaagaatgtggaaacggtagagacggcggtaggtattctgcaggagatggtgagcttgtgataaaagatgtctgtattggcggaaaccggcattgccgtagagtaagcaggatatgttaacgtaaaattgaatattaactaaataaacagctgatttttaattaattgtttaacggaattgaatttggggtgttttatattaaaaaataatataagacactcctttttcttttaacttatctatatttttactatcttacttccagtttaaaagcggacactgagatttttactcacatattgtctaatttaaaaaacacttgttatggaagtgaaaaaagcacgaagagccgaccttgaaaagggtaagtcccgttggctgttcatgggtctcattgtgacgctgtcgtttatgtttgtttcgttcgaatggactgaacgtaatgtaacttacgcgatcagtgatttagtcagtgacccggatttctttgaagaattagttcctgtaacctataatcaggataaacctctgccgccaccgcctccgccggctgccgtcaacccggaagagctcaatatagtggataataactcgacggaaacagaaaccgatattgcagcttcagaccctacggatgctccggtaattataccgacccctattgaagtacccgaagaagtagtggatgaaaatgtggaatttgtggtggtggaagagatgccggtatttcgtaacggtaatgctgatttgatgaggtatctgagtgaaaacatcaaatatcctaccgtcagtgccgagcagggagttcaaggaagggtagtggtgcagttcgttgtgggtgttcatggagagatcctgaatccggtagtggtgaagagtgtggatccgtatctggacaaggaagcaatccgcgtgatcagttccatgccaaaatggaagcccggcaagcaaagaggaaaagcagtgagggtgaaatacactgttcctgtagtcttcaggctgcaaagttaagatttaattagtatggatggaggaagcgtaatctcagaagaggacgcttcctcttttttatgacagtacggtcggctgtttatatgtgcaggacacagtgaagtgtcttaattaaagggtgtatcctaaatcgtgtttactttgttaatgtattgttttattgaaaggtacttgtctgtaattgccaataaatccaatcttaaatgatattacgggaatctgaatgtgaagaataaatttcggtaagtaggtctatgatataatagtctgataatcaaaattttcttgttttagatatttgcagcaaattggggctctcttcataagagaaccccaatttgctgcaaatatacgtataattcttcaatctgaaagttttcgcattagaaaaagtgtcttcaaattgccttaagaatgattattgtttgcaaaggttttaattctaaggaatattatgtaccacattatcagctggttaagataaattggggttctcttatgaagagaacccctccaaaaagaagaaatttaagggcttgcctgagccttatatttcaagattatgaacttaaattgtaatgttttgatggcaataaagagcgatgcggaatctgtaaaagtactcccgtcagacaatcaaaacataacgagcgaagcgcctaagttactgctctgcagttcaatcgcttccggctcagacctggggtcaaatgaaggagtcacgccattggcgggaataggaaaggaatacccggaactcagttggtactatctgtatctgtctaataaagagctgaaacgctatatcagtgtattcagcggtaggaaagctgtccggttccgtactctatcggggagtgtagaggaggaatttttctgtttcaaagtgttttcctatacagctgccgatcataggaaacgttttgagcaatgtgcttataccaaggaggaatatactgcccgccgtgactcagcccgggtggtgaaagaggcttttgctaccggttccacccaaaaattgaatactttgacggacgagaaggaaattgcaggtaatggctggctgtttgtctgtgctcccttggatcagttggagcgtattctgtctgccatgcttccccgccagtatctggtgacggactataacacgcatcgtgcggctgtcatccctcaaagccagatggaggaatttatctatctgtacgaatccatgccttacaatatcgaactgatgaaccgtcctttggaggactatcttcagaagaagcaaaaaattcgtattaccggtggcgtctttcggggaaaggaagggtgcatcatgcgtttacaccggaatacccggctggtgttcgctttcggaaatatgacggtggcagtgagctatcttcatgcatttccgtttgagaagatagagtgatggtaatttataaaggaaacatttctatcagtttatcaggcagaacgaccatatcggttataaggatttatagccgatggtcatcggcttttatatgagatacatcaaaattcgtcagctaatataaaatatgtcttttagtgaactgttttcatatatcatcggtggaactactctcataggcttgggtatgaccttgtgacaagtttatgggatatattctctacattttatctgcttggctttctgtcaagtgttaacttattaattcgtgtgcttatttgtagtagaatactcccttagcaaaagcattccgctaaagatatatgctttaaataaacagtcctaaataatataaatcttatatacttgcaaatggtaaatataaccgataaatccaaatgttgtggatgcaatgcttgtggggatgtgtgtatccaccaagccatcaaatttcatattgatgttgaaggattttggtatccggaagttgataaagacaaatgcaccgattgcggactgtgcgagaaggtgtgtccgataatcaataaagaagactggcatgaaagtggaggatttgaaaagcctcattgttatgccttgattaataagaatatagaagtgcgatttgatagtacttccggaggtgctttctcggctttggctgatgagatttataaaaaaagtggttacgtaggtggagccatttataatgaagattggtctgtatctcagttcttgtcttcaagcagggaagatttgtctcgtttgcgttccagtaaatatttgcaaagtcatcttgatggtttttatatcgctgttcgtgaagctctgaagactggcaaacccgtacttgtttgtggaagtccctgtcaaatggcagccatgaaacgttttcttcgtaagccttatgaaaatctgatggtggtggactatatttgccgtggcattgcttctcctctctattttaagcagtttatcaactatttggagcagaagcatcattcaacggtggtttattacaaagcgaaaagcaaggaattaggttggagaacactttccactcgtgtggagtttgcaaacaaggatgtcgattatattcttgggaaagaaaacccatggttatccatgcaatataaaataccggaagtctgtcgtcccagttgttttgactgtcctttcaaaggatttccacgaacatcggatttgacgataggtgatttatggtctagtcccggtagcatacctaaagaactggactctgacataggcacatctgttgtctttgctaataacgaaaaaggagctgatatgctaaacaaatgcaagaaaaagatcatttggagtgatttctcttttgaagaggcgaccaaaggaaattatcatttgatgtattctttaaagcactcagagcataacagagaagatttttttaagaccttgaacatttcttttcaggcctgtattgataaatatatgcctgactttggccaaactcagaagtcactcaaagaaaaaattaagaatgtggcttgttttataaaaggtgtgacgggggcggcaggatggaatataggaacttggataaagaatatgagatacaatctcttctgccgtcagatagaaacagacatattagaaagaaaatttattattatcaataaatattgtacgcttgatttacaccccaaagctaaacttgttttaaatgctcctttcattatgggctataaacgaatagaaggatcaaagttggaaagccgtttgttgatagaggagaatggaaggatggaaatcaagtacggtagctatacggtttattatggagcagatatacaggttttcaaaggtgctcatcttgagataggaggtgacgcttctgtaaatgttggtctgaatcttatttgtgccaaccatatctctatcggaagatggacaggtggcggacgaaatgtgactatacgcgataacaatggagaacatcacatttcgatcagaggttacaagacctctattcccattgtgattaaagaacatgtgtggcttacagaaaattgtactatcatgccagggaccactatagaagcgggagctattattagtgcccgttcagtagtacaaggtcatgtccccagttttagtattgtgagtggagaccccgctaaagtaattgaaacaaaagtttattggaaatcataattaattagatataatgaatttacaagaatttattagcaagtttgcttcccaatttgaagatgaagacccttctgtttttacagctgataccgattatcatgagttggattcatggtcatcacttacaggcctgagtgtggtagctatgatcatacaagaatacggcgtggaacttgacagccaggatgtgcgcaaggcagatactatagaagatttgtttaatctggtcaatgaacgtcaggcatgaagacaactatacggaatgtagagattaaaagcgtagcagcatggttacctgcaaataagatatcattactttcattttgcggatcttttcctgaaaagcaagtgagggatgtgatcaggtcctccggtgctgaatatgtgtatcgtgcagaagaaggacaaaaagcctctgatttatgttttaatgcagcagaacatctgatagagagggataatatagatcgtagctccatagacggactcgtttttgtttcttctacccgtgaatggattattcctgatacggcagtatcattgcagcaccggttaggattgtccactgaaacggtttgtcaggatattaattatggttgtacgggttatatttatggtttgttgcaagcttcagcatggattaattgtggtatgtgcagaaatatacttgtcttgtgtagcgaagtgctgactccatacctagactctcatgctgttggtagcatagaaaccagcgaagttgctactgccacattggtagcgcagggtgatagtcatatgaccattcatctttcttcaaacggttctaaagcagataggattatgataccttataacggatatctctatcaagatggtatgactgtattcacatatggtattgtcaatgctaagattagtattttgaatgtaatggaaaaggaaagttgggaagaaaaggatgttgagcttgttgctatgcatcagtccaatcagatgattattaaaaatgtacggatgtctttgaaatcaacgcctgaaaaatttcctactaatatgaaggaatatggcaatacgggatgttcgtcaattcctttgttgttgtgtgatttatatggtgacaaacagatgtcccaaccctctcgtgccatactttgtgcgtttggtgtaggattgacttgcggtagcatagctactaattttagtaaaactcatttttatgctcctgttaataaaaaatagtatgagaaaaaatgtaactgaatacttggatatcactgaaggtttatattctgagaagatagcagtggaagatgcaaatggttgtatcacatttggtgaaatgaaacgcaatgctttgaaaatagctgaattttgtgtagaacagaatatattcaagcagccggtttgtgtttacttgcctaagtcaaaagagatggtaacgagctttgttggtactaactatagtggaaatttctatgtcccattggatattaaatcgccagacactcgtatacggaatatattggctacgcttaaccctggattgattatcactgacgaagaacacaaagatcaggtagaaaattttggccttcccactgtgactgttggatgcctttgttcgcgtaaagaggcagatttatctgtagtggaatcagcaaggagcagacagatagatacagatcctgtatattcaatttttacatctggttctacgggtattcctaaaggggtagtgatttcacatcgtggtgtgattgattatattgattgggcggtagatactttccattttacagctgatgctaagattggtaatcaagcaccgttctattttgataactctactttggatatttatttgatgatggctacaggtgctacattgaatatcattccagagtcgaactttatgttcccagcaaaattggttgattaccttaatgaacatcatgttacttttgttttttgggttccttttgtgcttgtcaatgtggccaatttcaatatttttgaatcaaagaaaccagaatatcttaaagatgtgtttttcgctggagaagtgatgcctaacaagcacctcaattattggcgtaaacatttgcctagttgccgatatgttaatctctatggacctacggaaattaccgtagactgtacctattatattgtagaacgtgaattcgcagatagtgatccattacctattggtttcccttgtcgtaactcagatgtactcattcttaatgatgaaaagaaggaatgtgcaatcaatgaagaaggcgaactatgtgtgcgtggttcatcgttagcattgggatattataacaattctgaacgtacagcttctgcatttatacagaatcctctaaactcagcttatcctgaaattatttattgtacaggagatatagtatataagaatgagcagggagagattatgtatgtaggccgtaaagattttcagattaaacatagcggttaccgtattgagttgggtgaaatcgagaatgctgtattaggtacgcatatggtggatagttgttgtgttgtatatgattttaaaaacaagcaaatcgttctcttttatcagtctcatgaagatttgaacttaggtgaattccgtaagtcaatcttgaagtttatcccccgttatatgatgcccacggttaacaatcgtgtggaatcaatggaaatcaatgctaacggcaagatagatagaaaatattatacagctttacttaatggataagaaactatccttaattcctccttcaatattataaaaatggaattagtacaatcatatcatcagcttaattcttttatttctgaaatacgttctttacgtaaaggattcatttcaaatttatttctgcatttcgaaaaacacaatttgtggattgaaaagaaagaattgttttatcaagctactactgaaggatattttatttttagaaataattcaatggcaagttatctgttttatattacaacagacgaattccaattaagaaaaggattgcaagaaataactcctcaaatcaagaaaactgtaatggtagatattttggaagactccaaaatagaatctatcaaacaagtgttttttgacaatgactttcttttatatgaggaacttaatcggatgagccgaattggcttgcctgattcgattcagccgggattgggagttacatttgcagaaccggaagattcggttgttattcttcagcttttatattctaattttgaccctttatccgaacagattccagatattgaagaaattgcacattatatacaaaacaaatgggttttagtttataaactggaacacaagattgtaggttttatcatatttgaacttacgggcttaacattgtatttgcgttactggtttgtattgcctcagtttagggaaatgaatataggatctaagttattcaattcatttatgtatgaaggacgaaataccaaacgtcagttgttatgggtaataactcataatataaatgctatcaaacgttatgttcattatggtttcaaaccagaaaaattatttgattacgtattaaaactaaaataaaaatgaaagaaaagattattgcgattttaagtgatcttcgtccagaattcgattttaccgacgaaagtctcaacttcattgaggaaggcatgtttgattcatttgatgtggtgtgtcttgttgatgcccttgataccgaatttaatatagttatagatggcattgatatcttgcctgaaaatttcagtaccattgaaagtatcgaagctttactgaaaaaaaatggtgtgacagaataataatttagagtaggaaacagccattttacatgatcaaaaatagttgtattcttacttgtttatattagttatgtatggaatatttcaaactaagagatggaaataagctgcctgttatagccttgggaccaggagctgtagttcgaaaggaagtattaccttacgctcatttatcttccaatccaatagttaaaattggacaaaaggttgtgaataagttaatatatgaaaaggaatctcttgtctttattaataatgttgcaagaggcataaatttaggattcgaacttattgacaattctgctgcttatggttccagtcagttagtaagaatggctatattaaaatcaaaccgtaggagagaagaattatttcttacgactagggttagtaatacagctcaacgagagcatagagtaagagacgaatttttttcgacattaaaagcttttgataccaattatgtcgatttgcttcaattccattggcctgtaacagatatatacgtagaaacatggaaagaaattattaagctacagcaagaaggttatgttaaaacaattggagtcgctaactgtaatattcaccatttagaaacattgtataatgaaacaggtgtcatgccatctttgaatcaatttgaatgccatccgttatttactcagaaagaactcgttgattattgtaatgagcatggcatccaaatagaggcttatacacccatagctagggctgatactcgtatgacaagactacccttgatgaaaagaatggcagaaaaatataagaaaacaattgttcagattgtaattcgttggcatatacaaaatggcaggatacctatagttggagctagacataagaaaaatcaaatggctgatttggatgtttttgattttaatttgactgatgatgaattgaaggcgattgatgccataaatattaattcaagattaagatatgatccggataactgtgatttttctatattgtaagtagctttgcatataaaaatagagataaatccataaacaatgattgaaacagtcattccaaagctcagtggtgcattctacgctcattggaaggggacaaattcagactatatattacgtaaaagtttaatatgaatgatgataatagacgcatagccaagaataccatttatctatattcccgtatgatagttatgatgcttgtgactttgtacacttcacgtattattttggaaaaattaggtgttgatgattatggtatatatcaggctgttggcggaattgttggttttttgtcttttatcaatggtgttttaagtactggtacttctaggtttctaacattcgaacttggtactgggaatatggaaaaattgaaacggactttttccacactacttacttctcatataatcttagcactttttattgtattcttagccgaaacgggtgggacgtggtttatttataataaaatggtcatacctcctgatcgtatgagtgctgctgtatatgcatttcatttatcaatatttgcagcatttttatctttaactcaagtaccgtatagcgcaattataatagcgcgggaaaagatgaatatatatgcatatacaagtgtttttgaggttgtagctaagctaggaatctgttatttaataggagtcggtgattttgatagattgatggtttatgcaacaatgatatttattgtccaaatgagtttactcctgttttatagattttattgctcaaggaagtttgcagaagcaaaatatcaaatctctttagataaaaggattctcaaaccaattttgtcattttctagttggagcatggttgcaggaatttcgagtacgctatcaagtcaaggaattctcatacttttaaatatgttctttcttcccgctgtagtttctgcaagagcaatatctttgcaggttaataatgcggcatatcagctagtgacaaattttagaactgcagtaaatcctcaaatagtgaagctttatgctattaatgattatcaaggttctaaaaaactattattacagtcaactaagtattcttattatttgatgttgtttatgagcttgcctatgtactttttggccgatcctttgttgtatatttggctaggtgataatgttccagaatatactacaatattccttcagattgctattgtacaaagtttatttcaggtttttgatgtgtctttttatacagctttatatgcaaaaggacaattgaaagaaaatgctttaatatcaccaatgctgaatctattggctttccctgtcgtttatttgttgtttgaaaatggtttctcgcctgtagcactttcttgggcatatctcattgtttatgtacttgcgggtttattgataaaacctttgcttatagtgaaaatagtggattataagtggaatgaaatactatcagtttttatacgatgtttttgggttactgtatctgctgcaataccatcatttttcatgaataaattgctagattcttctactgtaaaaggctttgtttctgagctcctgttattagttgtaatagtagttatttctatatatacagttggtttagatgagattatgagaaaaaaaatacagaattttatctggtctaaagtaaagttatgttaggcttgttacatttaataaaaaaggtaaatgtaataaaatagtaagcaatttagagcataccatttttaaaatggtactttgtagtatcctgaatacaaccataatacttccgatcttcgctactgtaatgattaggagaaacggaatggaatttctttctttgcatagaaaacaaattaaaaagggaattgaatcaacgagaaatctttttgataccgttttattttggggcagatactttgtagcggttgatattttataaagctgccatattaagcaacaagcaaagcaaattgtaagcagtcaaaaattggctcataattgaaatctctatcttcgctgcgaacaaaaattttaggatttatgtatagcagtgaagatcttgaaaggttttactttcagtaccagaccgaggctttgcctcatggagaatctctccaatcgttttgtgttaagaacaaagttccttataacatctttcagaaatggtacagggatacccggaaaaaagtagttgaagtccaggttgatggtgctcctgtaatcggtcatgaggaacaatccggtgccattgatcaacctcaaccggtatcaccaggcagaactgatcaccctgttcgtatttgggttgagattcgtatcagcaatggcttgcatttgttccaaaagaatttaagctacccggatttggttcgtatggtagagaaactggaggggttatgctgagtgttaccggtctgaatcatttttattatgtccgtgatttcaccgatatgcgttgtaagcacagccgtgtgttgtctatcattcgtgaacggcttcaccgggaacccagagatggggatgtctttatagtcatgtctcgcaatcgcagaatagtccgtatgttttcatttgataatcgttcatatagtctgtttgaaaagaagtttgttgccggttatcagttcatgaaagttgagcgaaatggggcagatactgtttatcggattgcctggaaggacgtggttttgattcttgagaatcctatagttaaaacattaaaaatcagataatcaatctatttatccacttgcggttttgcgattattttattacctttaatgctgtaagtcaaaggtttaagtatgatcgatctgcaagatataattacaacaaaacgagagttgttgagtcgggaaacctactcacgcaaccctataaattatagtgcaggtatggcagaggatcagaaagaccgatacatacaataccttgctgagcaaaatcaggatctcaggttgacaggtgatgccatgaggcttgttttggaggattttatggctcagatgaaagaactgaaggatcagatgtcatccatgcaatcgaaacatgttgaccttgagaatcggttgtcagaagagcataaacttcgcaaatcggctgaacgtaagataaaatcacttcaggaaaaacttgattacgccaatcaggaacgttttggtgatagacgtcaaaagatacaatctaaagctaaaacaagtgattcagaccgccggaaggagaaggatgattatgatggaaccgatgatacgcttcgcacggattcggttggtcatgttccatcccaagagttaaaagagccttccgggaaagaccgtgacttgtccaatcgccctgacggttataaaacgatgggggtagccggagaagcgacagagcatccttccgatttgacaaaggttcccggtcggatcattgaaaggagaatggtacgggtgttcagtttccgtactttccttacggaagaatgttttgagatggttcattatgcagagcctggtaaaaagccgaagtggggctatttcccttctgaaggccatccggatgtagtaaccagttttgaaggcactagggccactcctgaatttctgcaggttatcgcctatgaagtttatgtaaagaatgtgacttttggtcttcttcaccaatggctgacagatatgggcatgaccatttctaaaaacacgttgcgcaactggcttaagaaaggtaagacatacctggacgaactggtttgtgtattgaagtctatagctttggaaaaagattcgattgtgaactgcgacgagacctggtgtaaagtgcgtaaatacgatcactataagaagtgctacatttgggttctggtcaacaaggcccggaaaacagccattttcttctatgagaatggctcgcgtggtcgtgatgtacttacagactttttgggcgatgcagaattgaagagtataatgtccgacggatacaatgcttatgtatttatcggcaatgagctgaaatcagcccggtttaaagatactgtccaccaggtttgtatgtctcatgccaagaacaagtttgtcaaggcttccaatcagggtggtgaaccgactgcagaacgcttttccgaaattttaaaggagttctttatgagggagcgtaaatacgatgatgccggattaactcccaaggaaaggtttcaagaaaggcaaagcttggaaacgaaggaactcctaatagagctgcgcagtttgttagatagtgaacagtcaaaggattcagaatttagaagccggtattataaagaagctctcaattatctgaaccggttctggaaagagatctttgcttacctggatgatggtgaattaccgatagacaacaacctggctgagcgaaccattcgaaagctgaccactcaacgcaacaattcacttcattatggtagtgatgccggtgcagagatggcagcaacttatcacagtgtgataggaacggtaaagcttcatggcagttctatctggaacttcatcggaacttttttcaaaaatatctttaacgggtgcagggattatgttaacatggttcctgacaaaatcactttggctgccagccaatgttaaattcaaaactaattaattaacaaaactcggtttagggcactgaaaagtgccctttcgaagggggatgccctaaattgagtgcttacaagcaaattgctgtttgaggaacctgaagcgcgcatctatcctcttagtgtcattaatgtggtgtaaagtgttataaacttgacgaacaaccagtttttcatcacgactcatagcccttatattatcgatgccctgttggagcaattgaatgatgaagttgctatctatttcgtggatatgaagtcgggaaatactactgtataacgtgcaatggaggatgaaatgcaagaaatgtacgagagtggcgtggatttgtttgttttggtagaaacataattgaagtaaggggctgttttcacaaccccccatactccttcaccgcatcaaaacaaggacagcccttcagcggattcaaatcccgatgtcctacaatgattgcttcgggcaggacagcccgcaactcccggagcaaggccagcagggtcgctttctgttccagtgtccgtgtgtccgcgggtatgccgccggcagacaggcccccttcataacagatgccgacagaatgccggttgtggttcttgcagtgcgctccgattcgctccagcgagcgtccgcggtgaatcccgccgtcgcgcgtgatgtagaaatggtaaccgatatccttgaaaccgcggtggtggatatggtcgtggcggcaggtctcgaaatccaggttccgcccctcaggggtggcggaacaatggatgatgatcaatgttatcttgcgcataccggccggttaaatacaactttgtatacctatgacgctgcctatagcagttgccactgcaatgataactttcaggatggtgctccaagtagattttcttttctgattttccataaaggataaagttttaagtgtgatacattaaagatttagacttccggttcgtttttgctcttcagcaggtctgccacggtttttccttccttttcggcacgcagtgcggcggcctgtgcggcacggctggctacaggttggaattccagtgtgccgaagatggtttttaaatcctctccgggaacatattggatattgactccggtgatatgggcggcggtgaaatccgtcagtttttccgttcctatactggctatctggagacggaacttgcccagttcaccgaaatccacctgctttccttcggtaagggcttccagcagattgtctacagtagcggtgagaacggccaccacatcggcgcgactcacggtagtctgtgaagaaacacgtttgctgagttgtttcaaggtaagttcgccattgatctgtgaggtggcgtaagctttgggagccgcatccttatccagaggattgggacgtaatgaaacactgtaatttaatgccataatgattttgttgttaaatgattaatatgaattgaacatgacaaagataacacttcggaaaggtgtggatatgaagggaaataaacagacatgaaggtgtgtgacacattgtggcggagaatgaaataaagtgaattaaaggttttgatatatttttatatgtgagttgtttttgttacatttgctttgatagataatctctgtgaataagcttgctgcaaaggagttgtaatagctggatatttacggataatagaaacgttttaaaaaagtgaatgtaatgaacgaagaagaaacgtatatgggcgaatggccggtgaagccttattacaaacgggatttggccatgggatatgcccccgatatcactcctgtggcagcattgaaccgcctttctgcctggatacaccatcataagccgctttatcaggctttgctcgattcgggatatgcggacagacagcgtattttcaattcggtacaagtggggttgattttccattatttgggaagaccgtaggagtcgggcgtccgtatgcttggttctacacgtcagtatgtgcagacctatgcatacgtatgtatcgcctcacacagacgtatatgtgaggcgacgtcgccgtatggattaaccattgttactactacattcctcttcgctctcatgctcttcataacgtccgcagggctggcgggtgtagtacacggttcctgtgcggcacagttcctggtcgcgcactttcagcacatccaggcgggtgaaggcacggtcgggttcgtttatacgggtgatggagaggatgaaatcggtgtaatttgcaaattttcttgtgcctttttttagaaaagttaaatatgccacaggatacaccggtaactaaggcttcataagttcgtttctcgttcctgtagtcttgaaaatcgtctgcctgttttctaaccgatagctactgccggtgaacttgatgacttcacatcgataaagcagcctgtcaagcagagcgctggcaaggatttcatcattcaatgtttctacccattctgtaggtgccttgttggttgtaatgatgatggatgtcttctcatgtagggtgtttatcaggttgaagaaggcagttgcttcctctcttttcacaggaaacagcatgatatcatctattgccagcagctgtgcgcgcagaatcttgttataagtcatcatggccggagttgagatgtctttaagtctgagacaatttacgatatcctccattgtcatcaggtatgccttgtaaccggccttgaccgcatcaaagacaagaccggctgccagaaatgtttttccagtccctgatggtcccatcaggatcaggttataagcttcacggagccataccagttcacgaagctccttcatctgccggcggtctatgccctcataaaaattgtagtcgtattcgtcaagatcatgttttcggggcagacgtgccgcaacaaggcgtctctcgtaatctttcctctctttcatctcaacttcggtgcctaataccagggacaggaattccgggtaggtcggtttttcttcctgtgcatgatgcagaatgctgtccatgcggtttgcaatgttgtaaagccgcaggcgtttggcgtgtgctttcaatttttcactttgtatcattcaaaaaacttgttatattggtttatatctgttttttcaggatgacagtccgctgtttccggaatggatgtcggagcttggaaagtcatcccgttcatattgtccttactcctgtggattgagccggatatttcctgcacggaaaggctgttgtatatgtttttttccagacaggtccgcagggctgctatcactgtttctttgccgtattcggatataacatgaagcagcagtttcatattgtctctgtaataacgcggcttttccctttccagattccggagccacagaataacggtggggtcatcttccgtccgctttcggatccggacctgcaagtcattcacactccgtgtcttgtccttatgatgtcttttgtcacatacatttttcccttttccgggacacaactcatgcctgcatatgagtttaccgctctctttgtcgtacagctcgatatgtccgttattctcaagaagccatacaacggtgttccgatttttataggtgccggagggcacgctgtagtagttggtccggtaccgtaccgtattgtccttgcggacatgatactctttcggctcgtctttggggggcaccggttctccatagtatggcaacagatatttccgttcaatctcaaattcctcagccggaaccaggcgtgtggttccatgtatcttgccgtttcctgttttttccagccattgcaggacctcggtgttaaggacttccaggctgttaaatgtccgtccggcaagaaagttacgcttgacatatttgaccacattttccacttttcccttgctttccggatcagcaggacggcagaacacgggctggaaatgctgctcgttgacaaaggcacggaatgttcttgtcaatatgaggtcacccaggttttctctgaccagcaggactttgtcctggtcatagattatccttcttggcttccctccgaaatatgcgaaagccagttcatgggcatatacggctagggctgatgtgaaaggcgtacaggaaaaatacacgaacttctgcctggaacggctcatcaccatgacaaaaaaataaactttgacaaagtcgttcctgtatgtgggcatacggctttctccgaaatccatctgggcatattccccgtaaggggtatccggcattttctcataaacacgtttggaaagcccctccttgtccagattatacttacgacgtacagtttccacaaaattgtatacggttttcccgcagacaacaggaagatcaggatactgttccttcatccagtcatgaatctgggaggcggacaggaacctgtaccgggaaagaacgtcacagacataactttcgtatttgtcaagtatgcggggatatcgcctgcgatgctgcaattttgcagtcaatgtgtcctcatccattttcaagtaccggcgcaccgtacttctatgcagaccaagctggaacgcaatctgacttttgttaaatccttttgaatataattctcttattttgtaccacatgatgactctgttgtttgattggtgtctgcatgcgtccttagttctgtccatatcatttatattattgaaacgcaaatatagacatttttaggaggcatgatggcatatttcctttttctaaaaggacatggggcaaagatacggattacaactccatacctgtccgtattaatattttaatgttgtaatattttaattttaaaatatcaaacaatttaaaaattaaaatattctgatattaaaatgtttttaaattgaaccgtcagaattcctttgaaaaaaagaatatccattgattttccacataagatcaagtgtgggttacagaattaggtgtctgatatttttgatgataatataacatgtatgggtaaataaatatcataaaacaacacctgcatgacttcatgtacaggtatttatgactaaagttttaatatttcaacattttgatattttaatgttttaatattaaaacactttaatgtattgacattaagtattggatggatatatatattgaatggatattaaaaaaaagtgacacggcaatttagaatgtatacctatcggattcgtggaaaaagaggacgattcaaaataatcctgccgcttctttttgttccttcttgacgctaccaggcatgtccggttctccgccatcattttcagattacctatatttttattcgttcatggacaggaatgttcatgcgcatttctatcggcaacccataagtattgactgtcaggtattgttcattttctttttttcgggaagattatgcagaaacagatattgtacttttcttgattttcagaatcggtttgataaagtctgccgtattgtcttccggtttgtccaccggccacttgccgatagcttccgaaggaacctcttacaaaatggcaatgccagtgcctttccggatttctccgtgtctttcaagacctgaaatccggcgcacatccgtatctgccatatgaccttgcagtttgttcctgtatggacataatatatatccgtttttctgtcacatattttttatattcatttcattccgcatggtcttttctcttttctttggaaagggctctgcccgagaaattccattttttcatcgaaaaaataataaggaagagcaagcagggttcaggcaaagccatgaaccaaatcacgcagagccgtgattatcaattgattattagactttttgtaaatagaatatttatatttagtaaattttaactagataagtgtctattttacagatttttacattgtaaacacaatatttacaatgtaaaattattatattgtaaatcagtgctttacaatgtagatataatatttacaaaaaaaatatggtctgagtataaaaacgttatactgcttcccacttacatttgcggaaaccatataaaaaatatgactgctttggaaaaaaaattcaatacgacaattcggttaaccgcagatgtgaaacagcatctggacgaaatgaaaggaagcgtgtcggccagtgaattcattgagacaatgctgtcctactttgagcggaacggggtggatccccgaacatcaatcaacgggaagttcaagacactggaacttcagggaatcgaacggatcatcaaaatcatccgtgccatagaaaaagataagattgacaagctgcttcctgcatcggaagcgcacagtgatgatctgctgaaacaggcagacaaacaggtcacccaactgaaagcggaagtggaacgcttgaaaaaagcaagtgctcctgacgtggtaggtagaaacaaattgggacaggttgtcaggctgctggaaaacgctttcgaccagaagaacttcaagaaggcggaaaaaggaacagattattttgtcgcaccggtttatctggaaatgttgttatataaagtaaaggaaatatgctcataaaacaggtaatggcccgtcctgtaccgactcatccgaagtggaaatacagtttgaacagagaaagtatgatacttttttttcacaagaaaatattatatggcgccaatgtggtttatgcggaaggctggcaacaatcaaaaaaaagaatggcatattctaccatatttccagcaatcctttacagaatgaagtgtccatatagtccggcgaattatctgaaaggggattatgaagttcgggctgtcacaatgaaggaacagaggacgacaggcggtgagttgaaaaaaatgcagtatcatacatgaatctgtattcaagaaatttcaataggaaccttatgattattatcagaactaaatccaggtggaatgtttgtaaaggtacataaaccggtcaacacaccctgtgtatgcgacaacaaggataggtgccgggcactggtggaatatctgttgaaggaaagtcttgaagacaaaccttattatgacactttcttctcccatgaggaggattatgtaccaccggtgacggtcatgcaaaagattgacagcaaccataagaagctgatgaaaggagatgataaattctatatgctgtccatcaatccctcacaggatgaagcggctcatctgatccggaaggttacaggaaagcaggtgacggaatttgaacagctcaccgtggaggaacaggaaaaagtcattcatgagttgaagaattactcccggaactgtatggacctgtatgcggagaattttcgcagggagaagataaaatcaggaaaggatcttgtttattttgggagggtggaaacggaacgccactacaggaacagtgatgaggaagtgaaggagggacaggcaaagtcaggggacaggaagcccgggctacagcttcatgtacatatcatcgtgtcacggaacgatgtgacacaaacagtaagactttcaccattagcaagaagcaaaggttcatttaatgaactaaacggtaagaaagtcatggtgggcttcgaacacatggagtggaaatcccggtgtgcggaccggttcatcagtatgtatggttacaaggccacacacaagtattacgaggacggcagggaacatacctaccattatgttccgggaaagaacgagacgatgagcatggccaaatccgccatcctgcagaaagaattcagaaacgagaggaagatgctggatgtgtcttaccggatgttccgtttcatggtgaatccgaaacaggctctcatagcggaagctaaaagactggtaaaggatgcgcttactggaaaaatctaaatcaatttatgaatatggatcatatgtttattatgagactggcagccctgctttttggcggcggcattgccagctgtctgtttccgggaaaatcccggatgtcacatgtcctgttcctgctgttggtacttgcagaaacagctgtcgcacatgccaccattccggatgggtggtggttcctgcttccgggtgtcgtttccgtacttcttcgtctttcttttaaaggagggacagaaagcggaaagggtggaaaagccctgctctcccttcacgccacggacgggacaattatcagatattattactggttctccaatttccttgtctatggaggagccggttccggcaagaccaaatccataggcaaaccgctgatggagcagtacatcaggtccggattcgccggtttcatctatgacttcaaggattttgactatacccggactgcatacaacctgatcaggaaacacggatacccccatgagttctattatgtaaatttcacggacatgaaccggacttaccgcttcaatccgctggacaggaggaatataaaggacaggacgatgctcatgcagctgatggaggacgtactgggcgcgttgatgccgcccacatccaaacaggacgaatggtatacgggcgcgcttggcatcctgaacggcgtggcgtacaggctttgggacgagttcccggaatgctgcacgctgccgcatatcgtcaacttcgtgatgaaggccgatacgggacagcttcaggaattcctgaagctgaacgatatcagcgccatgatggcgggggcgtacctcaaggcggaaggcagtgagaaaacacaggcctcctatgtgtccactctcagcaattatgtggcgaagctggccaccaatgagaacatatgctatgtgctgacagggaatgacttcgacttcaatctgattgatcctgaacatccgaaactttttgcaatcagcaacaactatgcaacggagtcggtgatatcccccgtcatcgccatggtaatgagtatcgcctcgcgctcgttctccatggagaacagggtcccctttgtatttatcctggacgagatgaccaccttcaaggtgcgtgacttcgagaagctgccttccgtcctgcgcgagtacggggcggcgttcctgctgctcacccagtccggagccaagctggagaaactgtacagcaaactggacaggtcgtccattgaggcgaatttcggaaatatcttcctgggccgcacacaggatgtggaggcattgaaatattaccctctctttttcgggaaatacgagaaggagaagaagtccaccagttccggcagcagcggtggcggccgtaattccagcgtgaccatcagcacacagaaggaagagatatatgaatcgaaggacttcgcttcattggaaccgggggaatttatcggaatgggaaaccgttccaatatcaaagggcatttcagaaagaagttcaggctgttcgaactggaggaggaaccgctgccggtagtcgcgttcaggacggagaaggaaatatctgacaattataccaaaatactgaaagatatcgagagggtgcttgggatggaagagatagatgtaaactctttattcaccgatagatagaaaagctgtatgtgttcgtcttacaatgtataaagtataaaaacatatatacaccataacagaatttcggcgactgttatttttgggcaggttagtatgaacagcaaggcaaactaaagttaacattcaccaatgggatgaaaaatgaaaaaattacgttccgccacagtcgaatcggttttaggcacattgcttgattttagggccatgagaaaagtacataccagaggtataaaattcgcgaacaaacatgtcttgttggcaactatggcttataacctaaaaaagttaatgaaccatgtttattataaattctcaatcttcaatctcgattgccaacgtaatcaacaattggttggattatatgaaatcagtaacgatctttaactttgacaaaataaatttgtttgcagatatttctttccgcttcccatattcgagtgatatgtttctgctcgaatataggaggcagctcgttttgtattcctttatctctataaactaaaattgtacttttagaatctatttttggtattttctaataaattccctacatttacacccgtttcatttgaattaatcttaataatgattgtagaaccggaagttgtaggagaatttgcctctggcagccatgaagcctttcataagatattcaagctgttttatcctaaggtatatgcttttatacggggatttataaaagatttggatgattctgaggatttgactcaaattgtctttataaaactatggaataagagagcgatttttcacaaggtacatcattttgattcttatttgttcatgcttaccaaatataccgtttttaattatatcacaactaaaaaagtctcccggtttacaagcgaagataatgttcccgagatttctgatgaatatactccttatgataaattgatagcgaaagatttgcaattattaattgatatggtagtgaatgagatgcctcctaaaaggaaaatgatatataagttgagtcggataaaaggactttctaacgaacaaatagcagagaaactggggatacagaaaaaaacggtggagaatcatttgaatatcgctttaaatgaactgatagacgctttggctctttctattttagtttatttaatactgccggtttaggtgtatcataagatagaactatctttatttatataaaatgtgaaaatgaataattatatacataagataatagactttttctttcatcatgaagtttctgatgagataacggaacgtgtttataatcgtatggtttttcctgtggaagataaagcaagagaagaagctgtttcacacatttgggataaactggacgatgcttcttgctctgacgaaaaaatagagaaggctttttataatttggagacctctttaggattaaaaaaagaagaacagactgtcgaattagtacatcgggaacatataagaaatacgaaaagaataaattggggaagagtagctgctatttgggctattcctttcattatggtgtgtttttcggcttactattattattctgcaaaggattatgtgaaggagacgttgtccgaagtgacttatatgcagcgttatgcagctatgggtacacgtgaagaagtggttcttcctgatgggagtaaggtttggcttaatgccggtactttgttggtatatccctccagtttcatatctgaatctcgcaatgtttatattgcgggagaaggtttctttgaagtttcaaaagataaagagcatccttttattgtcactaccaatcatttagagttggaagtgcttggtacgacattcaatatttcggcgtatccggacaataatcagataatggctacattggaaaccggcaggttacaggtaaaggtaaataaacaaccggagaaatattttctggaacccaatgaccagttgatatatactccttccacagggatagtacagcagcataaagtgaatgctgtttcccactccgattggcgtatgggagggttgttctttggcaatgtgccgtttaatgatgttcttcatactttggaacgtgtgtatgtaaggggggaaaaacgaaacgtgtcaatatgtggtcggcctgaaaatgactgattgctttggctgtcaaagcgttatgatgaagtaggggagagtgacttggaaaaacgaaacgtttacatcgctttacattgggcttacattttagcctcgtttgaacgccgttcaaatgaaatgctttacattgaaggtgggataggggagatttcgggtttgttcatcggttattctccatgaacctttccagatcgctctcatatacaaagatagtcaaacggatcggtttatgcaagtggagtgggggagtgcctgacgcacttcccttttttattttatctaaattattccatatagatgatatttggtatatttgcaatgaaataaataccgtatattatgagtaaagttatccatgtacatttgatttttgagaaaaagaacatctattttggtagtatatcggccatttttgaaactctaacggagcaacaggtcgggatcaccaagaatagtcttttacatgctggactggttgatgacattgccaaatacacgaaacgtgcaatgattattcagtctcgcttgataacatgcaccagaaagggctgaaacagccttagaacgtctataaagccgctttttgcggctttttttgtattcgtgtcggtaatagtacatcaatgggaggctgctacttactttgaacggtttgaacagtcggaaaaattgaaagggtttacacttgggtttacaacttgggtttacattttctccattacaaaaacgaaacgttttaatagggtttacacttgggtttacattttcggattattttttagcgatttgtctatctatataatatagataggacttgtttttgcttgtttttaaactatttgagggggtaaataatacattgataatatttatttactcccctatattttaattcatatctctaaaaatcagtgttttgttgctttttacccctttcaccccatataacgcattttacccggcgcctgcaagtgttgaactctccgcacctgaaacacgccccaaattgtcctgtttaagttgcacgattgtttgcttaagtgcacctatttcctctgccatctctcggatagtggcatctttatctgctataattgctagtaatttgtcttctattcccgtactttctttttgtggcagggtagttgtattattaaaagtggcagtttgtatgttaatcatctctcccctaccagtcaaaagccattctgaggacagattttcgcattttgcaaaaagaagatcgtagtcaagtgtgtctcgcgacagccacgagcttatagttgagggagcaacccctattaactttgcaaaaacagaaggctttccgtcactgtaatgctttataatagcctctaatctttcttttttattcattgttttatattttgcgaaattatttcgcagattgttttgcaatttgcgaaagatgatttatatttgccacgtgttcaaagtgtgaacaccgccccaaagctacaaaaaaggcttgaggtgacaatgagaaatataaaaagaagaaaaatagaaggttatgaaacggtattattttgaattgacagatcggagttataatgacctgggggcttttattccggatgggtacagcaaggaagtggctgtcaggcaagcaaagaggtggatggcagaaaacagtatagtattagccacccttatcgtgaatagcctaagaacatctaacgtgttggatgtaattgatattgatatacttaaaacgaagatataatggaagcaaaatttaaaaagggacaaagtgtgagaatcaccaagaggaacggtgaagtcattgatggtgtaatccgcgactgggactataacatttgtactttcggtcgtgaatataatgtcgattatatgaaagatggccaggtttggactgtgatatgtgttccggaggatgccatacaagaactccgatagatttccggggcagttagttcagttggtagaacacgccaaactcccgcaagggagaggccatggtccgtggttcgagtccgcgactgcccgctacaataatttaacttatcagcgaattatgaaagaacgaatagtggtagaatacagtgaggtgggtaaaatagccggtttgctgggttgttcccgggaaatggtctcccactcccttgcattccgcaagaacagcaagttggcccgttccatccgcaagctcgccatcgagcgcggtggaaccaaggtaggtggtaaccctgaaaagaaggaaagcgatgaaaagtgagttgatggcattgttcggtgaccagctgcgctggtttatacacttgaactggaagcagcgcctttgtgtactttacttctgtctgaatttctgtctgatattttctgtgagtgaagacaatttgctttgggcgctttttgttgtactgaactttggggcttcagtacggctgttgaagaggcatgtccctttgaatgatttggaggactgataacagaacggaaaatggaatactataataatatactgtgtgtaacctgtgaagagcttacttcaggagataatccggtgatgaagtatataactttataccaaaatgtccgtcgcggtaacatcgaaagtatcaaccgtggcggtggcgagggcaatgtagccctgtattcctattcttcccttcccgagaaatacaagaaacgttgggttgagcgccatggcgagcccgagaaacagatgcgagaagaaatgatccgtaacatagtgaagaaagacgagaaggccgagcgcttttttgaggagtaccgttacgacaagaacggtgagctggtcgcccttcccgaggatgtgaagaaggaatacacctggaacgcttcggtgctgaacgcgctgatggaagagttcaaacgcttgagttcatccaataacaagctgaccggtttccgccgtaacctttgggagcttctgcttgtcacgagtgaggagtggcgtccggtgtacgggcacagcctcccgggcagtgtgggccggttgaaagccctgataagcaagttccgtcccgacaactacggtgtgcttgtgagcggcaagtacggcaacagcaacacgctgaagatcgaggaggacggcgggcgttaccttgttgcattgaaacgcagccgtgttccggtttatactgatatggagatcttcgaggagtacaaccgtgtcgctccggaacgtggctggaagcccctgaagagtccccgcagcctccgcgaatggttcagcagcccgcgtgtcgaacctctgtggtacgatgccgtttatggggaaatgaaggcgcaccagcgttatgaccgcaaacaccgcaccatccttccgggccgccgtgacagcctctggtatggcgacggcacgaagctgaacctctactatcgtgatgagaacgggaacaagtgcactacaagcgtgtacgaggtggtggacgcttacagcgaagtgcttcttggctattacatcagcgataatgaggactatatcgcccagtaccatgctttccgcatggctatccaaacgagccggcacaaaccctacgagatcgtgtgcgacaaccagggcggtcataagaagaacgcggcgctgggtcttttctcgaagatcagccgtatccaccgcccgacagctccgtataatggcgaatctaagacgattgagaacattttctaccgcttccagagccaggtattgaagaaacgtttcggtttcaccgggcagaatattacggcaaagagagaaacaagccgtccgaatctggaattcatcaacgcgaacatcgactcccttcccacattggaggaactgaaggaacagtatgccgccgcccgtgagcagtggaactcaatgaagcacccggccactggcatcccccgtattgagatgtacaataccagcgtgaacgagggcaccgatccggtcagcgttcctgatatggtggagatgttctggtacacaaccgataaaccgtcgctgttcaccgccagcggtatcgagatcacggtacagggaaagaaatacccttacgaggttttctccgctcccggtgagcctgacctggaatggcgccggcgtaatacctacaagaagttctatgtccagtacgatccctatgacatgagcagcgtacggttgctttacaaggacaagggcggtgcgatgcgtttcgagtgtgtggcctcgttcccgctgatgatccaccgtgcccagcaggagcagacggaagccgaaaaacgtttcatccgcacccagcaggaggccgtcgtcaatgagcgtataaaccgtcaggtcgtcgccaaagatatcgagtatgagcatggtgtcgcaccggaacagaacggtttgcgtactcctgacctgaaaggtctcggaaaggaggcgcaacgccagattgaccgccgcacgagaaaatacagccagccgccccgtccttccataggccgtgacatgaaagtcatcagcaacgtgacatgggacagctttgagaagaaggaagtgagcatccgcaaggtggtcgggaaattataaggaacagatttataacaagataaaaaatattgattatggaaattacaatgaaagagaagaacgccatcagtgagagcctccgggcttacgtggcgaagtatccgagccagacgaaggccgcgggtagtctgaagggagtcagtgtgggtactgtgagcaatatcctgaacggccgttatgagaatatcagcgacgagatgttccgtaatgtcgcctcgcaggtcggtggtgtaagcgctaccggctggcagatcgtggagacgggtgcttaccaggagatcacggctgtactctctgacgcgcaacgctggcgcaatgttacctgggtgaccggcgaggccggttgtggcaagagtaccaccgcccgtgtttacctccaggagcataaggaggttttctatatcctctgctctgaggacatgaagaaaggtgactttgtccgcgagatcgcccgtacggtcggaatccggaccgaagggtataatatccgtgaggtgtgggggcttatattggatgacattatccagatggacgcgcccctgctggtgttcgacgaggcggacaagctgaccgaaccggtgttccactacttcatcagcctgtacaacaagctggaggagaaatgcggcgtcgtgtttttgagtaccgattatattgccaaacgcatcagcaatggtctgcgataccagaagcccggctacaaggagttctacagccgtatcggacggaaattttatgagctggagcctacagacgtgaacgacgtgttcgcgatctgttccgccaacggtgtgactgacaagaaagacatcgataaggtgataaaggaggcttcgacatgtgactttgatttgcggcgtgtgaggaagtccattcacaaggtgaaacgcatgacgggggaatgactcccgttcaaataccgttcaaacgtaattttaaggatatggaaaacaaatttgaatacttaaagatcgacggtcgcgagcagcttcccgctccctggagcgattacccagtcttgagggaatacgagacggtgaccgtttaccggaatggtcgcgactacctggacgcccttgtgggacagcaggacggctggtgggttgccggcgttcacatggaggtgggcggttccggtggcggtttcaacccgggacgtaaatggggacagttctccacccgtgagaatgcccttctgtgggcactcggcaggatgctctgccacgagaaactgcggggtgccgcacggcaggccgtgcttgatcaaatagacaatatccgacaactaaaactgttctgaccatggaagaagagaaaaaggataataaaaaagcgggcatgagacgtgccttgaatgtcagggacattctgaacaagaagtatgacgtattcccttttgaggggaaatggaaggatgccttcgacactccggaagtccggggctgctggttcgtgtggggcaacagtggtaacggcaagacctctttcgtgatgcagctctgcaaggaactttgcaagtatgaccgtgtggcgttcaactccctggaggaaggaacttctctgacagtccaaaataacctgcggcgctttggtatggccgaggtaagccgccatttggcgttcatcaaggaggacatccccaccttgaagatcaggctccggcgtcataagagtttcaacatcgtgatcattgacagcttccaatacacacagatgacgtatcgtgactatatccagctgaaggaggagtttccggacaagctgtttgttttcatcagccatgcccgcggcaagaatcctaaaggtgatgcggccacgagcgtgatgtatgatgccgacctgaagatatgggtagagggctacgtcgccttcagtaagggacgttatcagggggccactggtgaatacacaatctgggagaagggcgcctatgactattggaatgtggcgggaccgaaacagaaaggaggccaggcatgagcgggataaagaaacagctggagatttgtcctcccgcctatatgtgtaaggggcctaaccgtgagaacttcgtcagtaccggccacaagtgtggttactgcaagggcaacggctggttctggggaacggaagagggcagccgcgaggacgtgcatgtgtcctgcccggtgtgtggcggcagcggtgagctggatgcgattataacagtggactggaaaccttcaagcaagtgagccatgagaaaggagtattacaactacgttgtgaagctgcccgttctgcttcatgaactgttccgcgggaaggttgccgactatcatttttccgacatgacggtagtgatgaaccacctggtgaagtcctacatccgcatgacggatggtggcagggtctccacggccacccggcgcatcctcctctgcatggaccgtattccggacatgtcgttcttcttccgccgtcaggagaagtcggtgctgttcttcgagatggatccggccgttgccggcagcctgcagcgtgccatcatcgccggcggttggggcaaccgccagcgtcttgccgtccgcctggtgtgcgccttctgttgcggtgccggtgtgacgttgaacaacctttcgatggagcttgcctccgaagaggtgttccgccgcccggaaggctacctcatacatacctacgtgagcaactaccagtacgtgttcctgaaggagacggccgccgcccagcgcatgagcgtggagggtatgctgacggccgccgccgaactgctggtggggacggatgatgacggttccggttaccatatcccggagaacctcggtcgtatcgctgacagcgtgctcgggataaagggcagcacgctgaaggacttccgccggcagtgtctggtgagtatccgcacgaacaccatcggcccggagcgtatcgccgccttcatggagaggcatggcatctcctccgcccgtgagttcctgcgccgcgtggtcctcttctttctggaggcacggtacctcatttaccgaaaagaaatagaactcggggagaacgacctgccggaggagaacgagccggactgggaggagacgatgttcgagcagtgctcaaaaagagatttcgctatttcaacatataattattaaccattaaaatttaactgaaatgattacagaaaaacagaaagaggcagtaaaggaactctgccaatacgtggataacttttgtaaggaaaataatcttagtgcctttatgagcgttgcggccagtgaggaccatccggacgggcttgagcagatagccggctcgatcatcaccggcaagggtgagtatgttgtcggcgccatttcggggactgtcaaggccgacagccgtgtttatatgctgctttccatggcactcatgcaggcctacacgagaaagactgacattaatactattccgttcggtgaaaatttgaatatgaactgatgaatgtagcataaacagctatgagtgaaaataacaacaagcagaaacgtaaacgtgtctgtccgcattgcggccgaaagttgtggatgcgtgagttctatccgttgaagaatgggggacggagttcctggtgtcatgaatgtgtgctggcgtacaagcgtgaacagtaccgcaagcaccggaaggttgctgacggtactttcatgcaccggacactgggacggctcgtcgagcataagggatattccacccgtatcttttggaacggtaatatgctttccatcatgcggcgccactatcacaataccctcaaccgggagctggctgaaatgctcggtgtttccgaacgcagcgtcacccggaaggcccgagagatgggactggaaaaggacaaaagttttgtagcctcccttagccgggaacatttgttgctggcaaacgcgagaagcaaggaactgggatatccgggcggcttcaccaaggggatgaagtttcggggaaaccagtacaccgggaggataagagttgaataacatacagcacggtcaatattatgagtaaaaaaatggtaattgtggtcaccgcagttggtgtccgtaaagtagtggaaaaatggctctgtgagaatatgacttgcgagctggttgtgtcacgtaacgcacgccatgagtgttgtgtggaagtcatctatgatagcggaaacccttcggttttgcgtactcttctacgctctgccgtgggtgaaatcatagagttgtgctgatgtggtatgaatagtttgagttaatgaaaatctgaatagaatgggcatacttgaatttttcgaccagtataagtgtacaaaaaaatgaaaaagagcatcttcttgattatttgtgtactatcagagtaaagagagtgattaaggaaatcaatgaccttaaaataaacaaaaaaacagtatagccatgcagatagacatcaacagccgcaagcagttaaataaacccgagaattatgcggcgttttacagccttttgaaccgccttccgacatcggatcgtgaggcactgaaggaaagcatcgtttcccagtacacggacggccgcaccacgagcctgcgcgagatgacgctgaaggaatacagcgccgccgtggccgccatgcagaagctggtaccgcccacttaccaggaacagctccggaagattctccgccagaagcgttcctcggtgcttcaccagatgcagttgctgggcatcgatacggccgactgggaccgggtgaacgccttctgccgggacagccgtatcgccggcaaggagttccgtgaacttgactgtgaggcactggacacgttgcaggtgaagctgcgtgccatccgccgtaaacgtgagaataaacaacaatagcaaccatttaatttttcagttatggacttgaaagaacaattaaaaagcctgtccgcccaggacaggagggagcttttgaaacagctccagcaggaagagaaggaaaacaagcgcaatcgtcgcgatgcctacgaagggcttcgtgcgcagttcatgcttgaagtgaagaacaggctgtttccagttgtggatgacgtgaaggccttccgtgactgggtagagaaggaagccgcctctttccgtgacctgatgcgtgactatgggcaacttcgcaaggatgaccaggcgagtttcaccatcgtggacggtgacatgaagctggaagtgaggagtaacaaggtgaagagcttcgacgagcgtgccaacctcgccgccgagcgtctggtggattacctgaagcgttacgccatgagccgggaactcggtaccgatgatccgatgtaccagctcggtatgactatgatcgagcgtaaccgccagggtgatctggactacaagtcggtgagcaagctgtatgagctggaggaccgtttcgacagcgaatacacggagatcatggacctcttccgtgagagcaacgtggtgtacaagaccgcggtgaactactattttcataaacgtgacgagaacggtgtctggcgccgtatcgagccttcattctgccgattgtagttatggaaaagacgaagaacatcgcgccgcacgtcatggcctgcaagcgttgtgaaggcaagggacgtatcttttacctggaccagggaggagctcctttatccgcaaaatgtccggtctgtaatggcagcggacgggtgaaggtacagagcaaggtgatcacccgcatcgagccgtttgtcccgggtgaggatgacaccgaactgatgaccatgtgattttgttcacactctaaacagaaaaacgccgcattcatacacgatgcggcgtttttttattaacatccccggttaaatgcctaattttgcagcatatacctgaacttatggccaaaggacgagataaaaacctgatagaactccgtgatgaagccttgtgccgccgttactattactggacggaggtgcagcgcctgcgttttgatgatgccctgaaagtgttgtcccggcaggagtttttcatttccgaggagcggatcatgtccattatccggcgcaagtgtcgggaactgaaggacttggaggtgaagcccgtcccaaaggttaagaaaccccgcctgacagccatccagctttccctgttcacgggggaatgaaccttccccttactgcatggccgactcgtcatgcagcgtgaaggaataaaccgtctcgtacaccttgatgtttcccggcagcgaatagtcccggctctttaccctgaccagcgggctggtctcttccgtgcactggaactcctgcaaggctttgtacagctctttggccttcagctgccgttcccttaccttgtcataggttccggaggtgtagtgggtgtcatcgtagcagtcaatggccagtcgtatggtgatgagtgactcgcttttctgtaccccgtaaccgaggtcattccagtccgattcggcgttcccgacaagcacgcaggggaaggttaccggatagtggtcctcctccgccccggcttcaagctgtccgtagtcctcgtcaatgtatgacagttcaggcatcttttcggcgatgcgttccatgatcgcgataaaaatttcttccatgttgttataagtttaaaatatttctgatttcattctccattttacggtctatcttttcggacagttcccggctttccccgataaactggcgttgcggtatttttatccggagctttttctttttggtcagcgccagccttttccatttcagcgcttcctgattttcctgcggttcattgtttgcggcagaacccttctttttgccttttcttttgcccgtggcggcttttttagccttgcctgaagcctggtaatacttcgcccatgcaaaacgccgcatttggggcgtaacagtcggatgaacttctcctccccagttattgaccggcgcatagacgagttcgtttgccaccctcactcggtattctcccggcatgtatttgacggagctgaagagatggttccttccggagagcagcgtcccgtagctccctgccgcatcggtccgtcccgaggacagccttttcgctttcggccacgggtgtaatcctccgtttacgaaaccttcccggcggaagttgtcctggaaatggtcttttgccattcgtccggcgataaccggcattttccgtttcattagcccatccagttctttccgtttggcttttatcagttttgaatattcttttatgtccatgaatgactgaattaaaaaataattttatacttttgcagcaaggcgttttttatgtgcctttttgcgttatggaaatacctaaacaagtgtcggaattagcaaacagtagcggttacaactccgttgtcttatcagccagttcccctgaaggaagcatctattccgtgggctgtgttgacggggatggttttgagttgcctgtcggtcttcccgcctttattctgttcgacggccagtcctgccgtctggtggacggtgaggaggggctggcactttcttcccgtttatttggtgatgaatagtcccatgattttgggatttaccagtttgttgtctattcttatcactcccacacggcccgctttcatgctctgtatgtaattgcttgcatcatcctttccggtttgcgggtcgaagaaccttgtctttccttcagtcacctctgcgcagaacacgtgtgcggagccgcctttccaggcacaatatatctcgtatattccatcctctctgaatttttccctgaagtattccttcagccggtttgcattcattacttgatatccctttctgacctgccatttataggtatagtcataatccggctttgttccgtcccggttcaggaaacgttcttcccatgtgataccttgttttgccatttcattgtatgcgctttgtctgatgttgggttttgcctcgatgtcaaaccccaaccttctgagcatgtgtgtcacggtgcaggtctggcaattcacgcggtatccttcctcttttccgaatttcgggttctcctttcccttgttcgcctgttcgtatgtcatcggcttgcctttggtaacgccgagtgccttttctatcttgagattgttgcgggcgatgtcggttttttcctccagcgtcaggttgtccggcatttcggctatcatttcgttgatgcgcctggtcagtgcgtccacggctttttttgctcccggatgcgcttcagtaacgtaggggtgtttgtctgaaaacagtttgccgtcttttcccggattgttttccagaccgtcatgtgccttgttctgcccgttttcgtccggtaccgctgtcggcgcttcatccgttgatgagagcgtgcacttgcagttccatctgtccccgggcttgtgctcgttccagaacggatcatctatcggacgtatggtcccccagaaaatcctgtggtcggctcccggatgtatggatgtggacggcatccatttgagattcggcaatacgtccttttccctttcgaactgtctccagtccgcggcctggtgtgcccgtatgacggccgtgtcgtattctgtacgcagccaatggatcatctggtggtcggctatgggcatggcttccttcacccactgttcaaacggctttaaacttccgtttttgtccagcagcagcgctgccatgtcgttctgtgccctgtgtaccttgaaagctgcgaacacggcgttgttcattcggatttcacggtagaagtcataatccggatcatcggttttccgtgtcccaaaccccttgtcggtggctttgttcatcgttttccacgtggcctcgaacaggttctcctcgatgtcggtcatgggatggaaatctttgctgtatatgttcttcagggctttcttcagtacctcttcatcgaacgagaataaagtttccacctgtttgtcctccattctgtagaggtcgtttatcaccattctaaagctgccccgtctctccccggggctttcccgaaaaaacgtttcagccagttgtatgcgtttttaagggcatttttcttttctttgggtgttcctttaccgtgcttttccagttccggttcttcttccggatccggttcatcctcttccgccttttcggtctctcgggccttcgccgcctcgatttccgccgctttctcctcctggcgtttcttcagctcgtcatagtttgccggtttctcgatcccgaattcctcgtagaggtagtcgtcacctaccggcaggttgaagttcgtacgcagctgtgtgaggatggacatctttttctccggttcgataagcttcttttccggatagcagaactccccgcctgtggtgtctattccgagcattgcgaatatgtcggccatgtcatagttgagcacgtcgaggatgtcctgcctgtcggagagcgtcactttctcctccacgtccttgtgtacggttcccagtgcctgtgtgcccttgtcggaggcttcggtggtgagcgtgtttccgaggaacagctttgagatttcgttgttgcagcgctcgcagagcttgtcgtagaggtccgcgctccctgtcttgttcgcggcttccacgagcttgagcaccgtatcctccgcgtgcacgaaaaccgacaggcttccggtgctgtccgcgtcgtccagcgccctctgccgtgcctcgtcgtcatccgtgggatacgtgtactccctgatgggcgctccgaacacttccgcgaactgtgcccagtccgccacgtcgttacgtttgtatatcacccagatggctgctttcaccagcagtccgggatcgtcgggtgaaccgatgaacaacaggtcggggtactcgtcccaggacgtcccggtggtgtccgtctggtgccgcagtatgagcctgcgcacgggatcgacgtgtttgcgcggtatcaggtcgtagttcacccattcccccttgcggtagaactgcacgagtgagaacccccagaatttggcgtccaggatgtcccctatgaacttccggaaccatggggacctgatctgcttgttcaccttctcgtccggcttcccgttcctgcggaattctatggaagatgccagtgcggcattcttccgtttctctatgacacttgtcaggtgcgtgtccatgagtatgtcgctgaacaggtcgtacagcctgaagcgtctggagtagtccacattctcgaaagcccttaccgcgagcatgtagtccgctatgtctataccgaaccttctgggctgtgtcagtatgatggttgcgggtcctttctgcccgggcctcggcaggttcccgctttgggttatctttccggcccctttctttcttttgttcatattaccaatggtttacacgtttacggttgcttttgataaggaaatttgattttgccgccctcgtctcttcggacagcaggggcaggccgtccaccgatatctcctcggccgccacggctttcagccattcgaccgccctttcgtggcgttccttccgcagcggtgacaggttcctcgggttatgtatgcagaagatgtggtacacggctatgtcgatggccatcatcaggacaagctggttgcgtttgtcaccggttgccgtgaatattttgtcacagtcgtaacgtctggaaaggtagcagcgcatctcggcgacggcgcggtcctcgcatatctccacgacggcgtcgtcctcccttgtcagtgcgtccagaatctcgcggtgtatgctcgcgtcgtagtctgaaagttcgataaatttgctcataatgataggtattgaagtttacactctgtacttgttttgtgaccgcgtgcttttccttgtgacaatgacgggcttttccgactgtctggccttgcggtctataattctgtttcccccctccacgcagtcgggtccgtctgccggataggtcagttgcaggttgaacagcttgaactgttccgccatccgtttcatgtgcgggttgtccttttcggcctcgttgagtaccaggttcccctcccggttgagcggttccaggttcgcctcgatacgtgtggccttgtcggtcttcttctcctcgtccccggcgatgtacagtgatattttcctttccctgcgtatccgccgcacgatgggctggaatacctgctggaaaaaaggatcctgtaatttgttgttctccatgtaacagtatacggtggttttcccgcccacgaactccagcagcttgatgtaccactctacaaattccgcgttcagccccctgtccaggaacgtttttatcagataaagccttcccgcgagtttcccgagcaggcacaccgttttggtggaactttttttcgtcttgttctctcccggtgcggggtccccgtatatcaccaggaacttgaacttggaaagtgccggcactttcccgtaggtgatttccgcgaacacgccgccgtccaccaccgggttgttgaagaactctttctgtgccgccgccgcgctgaccagtgagaggaagaggtctatatcctcctcggagttcttttcgggccatacggacagcccgtcctttccccggatgttgatgatatccacgtgcccgattcctttcgccttcagttcggttgccttttcgatggcccttttgatgcagcagtccggcgcgatgatgttcccgttgaacaggatgcggtagtttcccgatacggacatggtcggtatcagcgcctcctccagccatttccatttggttttgatccgttccggattccggcactcctcgtcggtgtctatatcgtccaccagaatgaagtccggccggaagttcttgttacgcgtaccgcgcggtgactgcccggctccgatggcgcggaaggagcatccggacatgcaggtgaactccccggtttcccacgctcccggttttttctgctgtccgtagtcctgtatgatccgctggttctcctcgaagttcgccatgaacggcagcagtagcctttccgcattgtctgccgagttggagatcagcagcacgttgcgtatcttttttgtcagtgccagtttggatatctccatcatggagcgtgcggatttcgccagctcgcgtgaccaggcccttacctcgtaccagcggttgttcctcatcagccgcccggtggcttttttgtggaaggcggcggactcgcaggtgcaatacatggcgaagtagtatttgaaccactcctcgtcgttcttctccagtctttcccgcctctgcctgatttccgtttccgtgtccgtggggttgatgtccgaatgttcgcgcacggatgccaccagctcgttccagttgtccagtgcgatcctgtcctggggtgtgagtcttttctttgccatgtcaggataattttgatttgacaaacgcgtccagaagcggggtgatctccttcgcctgcgtggaatcgtaggtccgcacccatttgagcaggtcggagaacacggagatgatgtccgccagccccacttctgtttccagtttcttgatggcgttcgacagtttggaaatggtgtccgcttccgcggcgttcgggaaccgttccccttccggctttcccatgatggcgttgttgagttccgccagctgccggtacaggttcttcagctgctcctcccgtgtgatggttatggaagccttcagctgctcccagtttcctttgcctatccagttgttcacagtcacccgtgaaacccccacacgctcggctatttccgcctgcgtgagcgtttcgcgggtgtagagcgttttcgcccatgcctttttctgctcgtttgtaagttcggccatattacctccttttttacgtgcaaaattgataaggaaaaggagcgaaaaaaaacgcgctccgcatgatgacattttaaagcgtcatggcaatcctttaaagtctccatgatgaaaacgcggtttgaaaaaggcttttaatccccctaatttcgcaccgtaaactttgcagggaaggacctgccaaaacgatagtgacatgagtagatttttcaatatgatacccggaaccgatgcctgttgcatccttctttacggtgacatcggtgagtacgatgataacgtgcgcagcggtgatattgcccgtgaacttctggaagcggaagccctgaccgggaaggtggacgtgcgtatcaacagcaacggcggcgaggtttattcgggcatcgccattttcaatgccttgaagaacagcaaggccgacattaccatctacgtggacggcatcgccgccagcatggcctccgtcatcgccctttgcggcaagcccgtgcagatgagccgttatgcccgtctgatgcttcacagtgtccagggcggctgttacggcaacaaggatgagatgaaggactgcatccgtgagatcgaggcgcttgaggataccctttgcgagatgtatgccacccgtatgggcaaggacaaggaggaaatccgcgcgatgtattttgacggcaaggatcactggctgcgtgccgacgaggcgctggcgctggggcttatcgacggtatttatgacgctgacccggtaccggaggacagtacccccgaacaagtatttcaaatattcaataaccggctgcacaagccacaaaacgagaatagcatgaatttagacgaactcaagagacgtccgcggttcaagaactgtgcgacggatgacgatttcctgcgtgaaatcggactgctggaaacggaggctggcaaagtcccggcccttgatgccgaggtcacccgcctgaagggcgaactgaaggtgttccaggacaaggcggatgcggatgacgctgccgcgcgtaagaaactgcttgatgatgcggaacaggacggccgtatcgatgccgccacccgccccatctatgagaaccttctggcaaaagaccgggagaacggggaaaaggcattggagaagctttcccccaaacgtagtgtcatgaccgaccttcgtgtgaatccgacgggtgaaagcccctggaacaagcgcatgagcgagattaaggacaagttgaaccataaataaaaacatttgccatggcaatagtagtaagaaacacgaattacaacggcgaggtactggagaaaatactggtcctggccaccaccgggaatgaccttgtagaaaaaggtctgatcatggtgatccccggtgtggagaaaaaaatcagcctgccgcgtatcaagaccggcaagatgctccagaagcgtaaggagaacccgactttggaagactcgaaaggcaatttcaattactcggagaaatcactggatccggaggacttcatggcgttcacgactttcaatccccgtgccttcgagcatgtttggcgcaagtggcagccgaagggcaacctcgtgtttgccgaacttccccccgaagcgcagaacacgcttctggatgaacttagcaagagtgtgaagttcgagctgggctggcattacctgaacggcgagttcggttcggacgacgaccaccttttcaacggtatcctgacccaggcggctaaagatccggatgtgatcgtggttccggctccttccgatacttccatgatcggcaagttgaaggctgtccgcaaggctattccaaaagccctgcgtgagaatccgaacctgcgtatcctgatgagtattgacgacttcgacaagtacgatgacgagctgaccgaacgcgagtacaagaacacgagcgagacggacatcaacaagaagcgttacaagggtatcaccatcgagacgctgaattcctggcctgatggccttatcgtagccacgctctgctcgatgagcgctgacggcaacctttttgccggtgtgaacctccaggacgatgaggaggtgatccagattgacaagtggatgaactccagcgagctgtacttcttcaagctgcttatgaaggccgacacggaaatcgccttcggcgaggagttcgtggtgcttgacacccgtgagactccggtgttcaaggcggtggaacgcagcatttctgccgatccggacgctctttctttcaaggccgccggtgagagcaaggaggtgaaggtcactgcctccggtgattacagcgtggtttccattcctgccggtttcacggcagtcggtaccgatggctctctgacggtcaccgccggtgtgaacagtagcggcaaggcggtatccggcacacttgtactgggcctggacgccgatccggagaagaaggtggagatagcactgtcccaggcggccgttgatgaagaggaaggcggtgagtgatgggaaagctgaagtatcttgtcatccattgcacggccactcctgaagggcgtgaggtaagcggtgcggagattcgcgcctggcatacgaaccccgtctcaaagggcggccgcggctggaagcaggtcggatataccgacctgttccatctgaacggcggagtggaacgcctggtgaacaataacgaggacgcgaatgtggacccgtgggaagtgaccaacggcgtggccggttacaattccgtgagccgccatatcgtctatgccggcgggtgtgcaaaggatggtaaaacgcctgcggacacccgtacctcctggcagaaaaaggcgcttgagaagtacgtgaaggatttccatcgtcgttttcccgatgtgagaatcgtcggtcacaatgaactggcggccaaagcctgccccagttttgatgtacagagatggcttaaacaaataggtataactcaataaatcaacaacaacatgaaaagatttcttttattctttgtgctgatactcggattcgtgtcagcaacttttgcccagaccggtacagtaccggaagtcgattatagcgcgatgatcaccacctttgccggttttgtcggtggcgtggtgttgctcacggaagggatcaaggctctgtttccaaaaatgcagggcttggcgacacagattgtcagctggtgtgtgggcattgtggccgccatgcttttatggtggctggatgcgggctttgtcgctgatgccacgtggtatatcgcgttgtgttacgggttcggtgcgtcccttgtgtccaatggtgttgccgatacgggatttgtccagtggctcatcggactgtttgcgggtaaggatgccggtaaataggctttgacctgaaagaccagtgtgcgtatggacttcagtgctgtcatgaatctggtgctgggcggtggtctggtagccacgataatagccatcatcaccctgaaatcaacggtcagggaagcgagggcgaaagcggagaaggctaccgccgaagccgagacggtacggattgacaataccgaacatgccacccgtatcctgatcgagaatattgtagaacccttaaaagaggaactgaatgaaaacaggaaagctttgcaggcgacccggcgtgaaatggcacgcctccggaaagccattgatactgccaacagttgcaggcatcatgatgattgtcctgttctttacgggatgcgcgagtactcgaaagagcaggacggaggtgaaccggaacagcagcctgtcgtcaagcgccgacaacgtgtcaaacgtgaggcgggggttgttgatggcggggattccgaaatcggcggtgagcctgacgatccctccggacagcctccgtaaacttccctccggttcgtcctaccattccaggaacgggcaggcgggcctgacggtgaagagcgatgcggccggcaatatcatagcggaggcatcctgcgacagcctccagcggctggtactgtgttatgaggaggaactgacccgtatccgtaatgagacacatgaggactcattcacagttgaaacggaatttgaacgtcgctttagtcccgttaaaatagcgctggccgcttttataaccggatgtgttgccggcatagtattaactttcaaaatcaagaaacaatgaataagaatttcatgtacggcgtcggtgccgtgaaatacaaggactttgtggtgggttacatagagaagaattcgtttgacatgggcgggcagaaacccgaatccgccaaaatcgaggcggagcaggtgccgggaaccccggtgcttatcattccccagtcgaatggcagcatcgcccccacgttcaacgttatccagctgaactacgaaaacctgcatagcttgctgggtggtaccatgcactacaaggaagaggactcggaaaagaaaaccccgattggttggacggccccgacggcagccgtgttgctgaccggtccgtgggaaatagcccttgtttcggggcagagcatcctgattcccaatggcacgctactttccaatctcggcggcaagctgaccctgacagaaacggcgaaaatcgaatgcacgctggaagtggccatgccggaagacggctcccagccccatggcgtattcaatacggattctatcccggaagagtggaaacagtataaactgcctcctgctgaatctgccgccgctgcttccactaacctggccgaggagtagcgtatggacgaagctgtcatcaagcagatccagcgtgagggtgcggacgcgctgctggatatcggtgtgagcgtcccgctgaaagcgtttcatatccctttcaggaaatccccgctggagctgcgcgtgaccatgaggcggccttatatgtccggtcagattctttttgcccggacatatttgtcgatggggatcaccagtgaggagatgtgggggttcagcaaggaggaggaaatgcagtttctggcctctcacggcaaggcggtgagccgtatggtggcctataccctttgtcgtggccctttcagccgccgcgtgcttttgcgcccggtggcatggctcataaggaacttcatggaacagcgttatctggtgggtgcgatcaagcgttttgtcagcctgatgggtaccgacccttttatacctattatcagatcagccgagcggacgaatccgatgagcttgagactgagccaaagaaagaaggggagttaaagagccgttatgaaggctcccatagccctttcggttttgtgtggcagattgccagtgccaccggctggagcgtggactatatactgaacaaggtgaattaccagaccctgatcatgatgcttagtgacgctccccggtatgtccgtgacaagtccggatcttccggtcctgcggatgagcggagcgccgaggatgaagcggatggaatagtaggattttttcaaagcaagctaaaatagatgaaaccggtacaaatagaattccttatggtggaccatttgagcgcccgtcttgacaaggccgtgggcaagatcgagcggatgtcccagcaggcatcgtccgccaacagacagatccgggaacttgacaggagcggttccctgttgaacaacaccgtcggcaagctggcggccgcctttactatcaaggagctggtgtcgaacatcaccaaggtacgcggcgagttccagcagctggaggtgtcgtttcagaccatgctcggcagtgcggagaaggccgacaccctgatgcagcagttggtacatacggccgcgaccactcctttcggcctggaggatgtcgcgcagggtgccaagcagcttcttgcctacgggtttggagcggagaaagtgaacgagacgctgatccgcttgggtgacatcgctgccggactttccatccctttgaacgatctggtctatctttacggcaccaccatgtcccagggacggctttatacacaggacctgaaccagttcaccggccggggcatccctatgatcgccgaactggccaagcagttcggcgtggctgaaagcaaggtgaaggagcttgtggaggaaggcaaggtcggttttcccgaagtgcagaaggtcatagagagcctgacggacgagggcggaaaattcggtggtctgatggaggcacaatccaaaacgataaccggacagatctccaatatagaggatgccgtttcaatgatgttcaatgaaatcgggcagcagtcggaaggtgtcatcaacaccacgctttccggtgtttcctacatggtggagcattacgaacgtttcggccgtatcctgctcgggcttgtcggcacgtatggtgtgtaccggaccgccgtcatgacagtcacggccgtgaaaggctgggcggtggctgcggaggcgttgcattacaactggctcctgctggttgagaaagcgcagaaaatgctcaaccggaccatgctttccaatccctatgtgctggttgcgaccctgcttgccggtgttgccgtggcactgatctccatgaagacggaaaccgaacgtttgcaggaatccgaggaaaggtatcagcagcagaagcagaaaaccatagaggccgaggaagagcacaggcgcaaaatagaggaactgtgttccattgccggggatgaagccgtgtccacggatgcccggcgtgaggcgctaaacaagctggaacagaaatatccggatatattctccaaatacgacaccgagtatgagaaactgaagaatatcaagaaaatcaaggaagagatagcccgattggaagccggtgagtccatatccaatcccgccaatgaattgaaacgtgtggatgacaggataaaagaacttgaaggcaagacccggttggcaaccgaatattaccaggacagctacgggcggcaaagagcccgatatgtccggaaatccgcacgttcaagggatgaggaggcagagcttcagaatctgtacggaaaacgcaagagcctgaacggacaaatccgcaaggacgaggtaaatgcctatttcgaaaacctgaccggtgtgagtaacgagacccttgtacagcagataaagcagcgtagaaccctgcttgcccggatgtctgtccaggagaaggaatacggaaagattacgcagggtgacgaaaatcttaccggaacttattcccgtgacgaactgaagtatcagctgaacaaactggtttcggaacaaaaccggcgtaacctgcccacggattcaagcactgactgggtggctgcgacaaaagagaaataccaggacgcgctcaaggcttataacgcctttcttcaggaaacgtccaacagcctttcccgtgaggagtttgagaagaaggcgaaagaactgaaggatgccgtcgataccgccaaaaaggagtacgacaaggtcaagcccggtgaggataaggattccgaggccgaacggaagaaggcggacaaggcggagaaagaagcccaacgccgcaaacaggtttctgaaaagctgggccaggaactcgccgggctgcaaaggaagaatgacgaggcggagattgagatgatgaccgaggggctggagaagaagctgcgccagatagacaatgaataccaggcacgcaaggatgaaatagccaggcaggaagccggttggaaacgtgacaacgcgaaagcggggcagtccggttcgctgtcggaagatcagcagtccgaaatagacaaggcccgtgagctgaacgagtccggccgacagaagaaaatagcggaagcttatcgggaagagttcggagtgatgcaggaatatttgcaggcctacggcaccttccagcagcagaaactcgccatcgcgaccgaatatgcggaaaagatacaaaagacgacgtccggcagcgagaagctctctctcggtgttgaacgtgacagcaaacttgccggcatcgaagtgcaggaactgaaagcccgtattgactggggtactgtcttcggtgaattcggcgggatgttttccgatatgataaagcctgtattggcggatgccagaaaatacatgctcactgacgagttccgaaatgccgaccatgccagccaggacgcgcttgtctctgccgtccagcagatggagagggctttgggcggttccggcaaggtcagtttcaagaaactgggtgccgaggttactgcctaccagaaagccctttcagacctgaaggaggcacaggcggtgtatgcggacacctatacggcacttattgccgcccagaaatcatacattgaggcgcaacagtccggaaccgaacaggagaaggagtccgcccggcaagccctggaaacggcgcaggctaatgccgatgccgcgagtgagaatataaacgccttgcaggaaacggctgacagtgcccggcagtccctctcgaatactgcctccggtctgaagaccagtatggagaatgtgagggacggattgcagcagattgcctccggcagtatcagcggggcgtataatggcctgatcacactcggcaaaggtgccaaggaagtggacggcaaactgggcgaggctttcggaaaggtttccgaaacacttgaggatgtgcctgttgtcggctggattgtaagtattatagaccttttcaaggatggtttgagtgtggtcatcggtggcctgctcgacgcggtgttcaatgccgtgagcggtattcttgacgatgtgctttccggtgatctttttgtgactatcggaaaatcgctgctttccggtgtgggcaagatattcgacgcattgacctggggcggattttcctcctggacgacttcaagcaatgccaaagaggtccaggaaaccatcgaccggctgaccgagcgcaacgagaccttgcagacggctatcgaggacctgacggaggagatcaaggcgagcaagggtacaaagtccgtggccgcctaccgggatgcctacaggctccagcaggagacgaactcgaactatctggacatggccatgtcgcaggccggttatcacggttcgcatcacagctggaattattactggggcggtttctcacaggaacagattgaccgtttgagcggtcagatcgggcgtagctggaacggtgacatctggaacctaagtccggaggagatgaagaagttgcgcagtaacgtggacatgtggacgcagatccaggataccggcaagggcggatatggaggtcgtctgaccgagaagctggatgactatatcgaccaggcgggcaagctggaggaacttaccgaccagctgtatgaaggtctcaccggtatttccttcgacagcatgtacagcagtttcgtggataacctgatggatatgaagtatgatgccgcagccgcggcggaggacatatccgagtatttcatgcgtgcgatgctgtcaaacaagatcggtgagctgtattccgacaagctgaaaggctggtgggagaaattcggcaaggcgatggaagacaatgaccttacagaagccgagcgtaaggccctccaggacgagtacatgaagtatgtcgaggaagccgtcgctcttcgtgacaatcttgccgcggccaccgggtacgataactcgggcggtacgagccagagcgccaaaaccggcggtttttcagccatgacacaggaccagggtacaaaactggacggcatgttcaccagcgggttgcaacactggtcgagcatcgatgagaagatggagagcgtcatcgacaagatgaacaccgccgaggggcatcttgcccgtatcgaggagaacaccggcacgagcgcgtcgcaccttggcaaaatagaggaagagattcgtaaaatcaatcgtgacggagtaaaatgcaaatgatatggaaaagatattaggcggtctggtacttgtcaacggtaccgacatctggagtacatacggggtgttcctcgttgaggacaagcgcggcgggatggataacctgaccgccatcctgaccccgagcaagacgaaaacggacacggctgtgaatatccgggaggaggacggggagaaatattcctccgtgctgacgcccaggaacgaggcccgtgacgtgacgcttcatttcgccctgtttggcaaaacgcaggccggctggctgaagaagtatttcgagttcatcaatttcctgaagaaaggccgtgacgggtggcttgagatttcctttccccaacttgccctgactctccgtgtgaaatatacggattgcagcaagttccagcctctgacctatctctggaaggaaggcgtgcacgccggcaagttcaaggtgaagttccgggaacctgtcccgatcatataaatgtgattcaaaccctattcaaacgacgtttaaacaagatacagacatgctgaccatctatgacagcaacggcaacagacggaccgatatcgaggcgggcgacagctccacccaggtgaaggaggtgcagggtgacaatgtcctgacactctctttcacgcattacgaatatatcgccctggacgtgaatgaccgggtggactttgagggtgagcgctactggctgaccgaacggtacaccccgaagcagaagagcggccaggagtgggtatatgatttgaagttttacggtatcgagagcctggtgagacgttttcttgtgctggagaccaccgacgggaacaccgagcctgtgttcacgctgacagcgactccgcgtgaacacgtggccatgatcgtgaagtgtatcaatgacggaatgaaccacaccaccgactggaaagtggggcgggtggacggtacggaccttatcgtcatcgattacgaggggaagtactgcaacgaagccctgaaagagatagccgaagcggtcggcgggcaggctgaatggtgggtggaaggccagaccgtgaacgtgtgccggtgtgagcatggcgaggaaataacgctgggctacgggaagggactgaccggaatcgaacgcgacacgacgggtaccgacaatttttatacccggttgttcccggtaggcagcacgcggaacatagatccgtcaaaatacgggcatagccgcctgatgcttccggggggcaggcaatatgtcgagatacatacggaggagtacggcatctatgaccgttacgagcaagacgccttcagcggcatttatccccgcaggatcggggctgtcagcagtgtgcgcagcgaagatgtgaaagatgacgacggcaaccctttcacggtctattatttcagggacgacagcctgaacttcgatccgaacgattacgagctgcccgacgagaccaaacgtgtatcgttccaggacggtgacctttccggactggggcagggtgaggaccactatttcgaggtgaatttcaacagtgccacccgtgagttcgagattattacgatatggccctatgatgatgacacgcaactccccggcggcaaacttattccgaaatccggtgaccgttatattctctggaatatccgtatgccggacgaatattacccgcttgccgaggaggagtttcttacggcggtggaacagttcaataccgaacactggcaggatcttgccgtttacaaggccccgaccgaccatgtgtggattgaggagaacggtgtttccctgtccgtaggccgtcgtgtgagacttgaaagcgaggagtatttccccgaaaccggttatcgcagcagccgtatcacgaaaattacccggaaagtgaaccaacccggggagatggacatcgagatcagcgatgccctgcatagtggtgcgtttgaacgggtgaatgacagtatcggggaactgaaaaactatacgaagtcaaaggcggagggtgccgcgcttcctgacattatccgtagctgggacaagacactgcctacggacaacaatcttttttccgcgcggagaagccaggcggaacacatcagcaaaaaaaagaatgaccgtgcaaaggggaagatcaccttcgaagcgggagcctctttcggacaggaggataatgcgggtattgatgacaagggcaatgccgggctgctgacccttgttgtgcgtgagcttcttcgcagtccgaaattcgtggacggtcttttcggtgagggctggcggctctggatggaggacgctttgtcccatctgaccatcgacaagctgacggtacgccaggtcatggtagtattggagctgcttatcgagaaggtacgcagcgtcggcggccagctttgtgtcagtgccgccaacgggaaaataaagaccgctgttcttgagggcggttactggaggatcactttcgagcaggagaacactttcgtggcccatgacctcatgcgctgccagaccttcagcggcgggaatttgaaaagctattgggttgaggtggccggcgtggagggtggttccatcctcgtgggcgaggacgagttcggcgcttctcttccggagtctggtgacgagtgcgtgctgatgggcaacacggagaatccgttgcgccagaacctgatcctgatctccgccaccgaggacgggcagccccgtgtggacgtgatggacgtggtgaaggcgaagaacttcaccggctgcctgcgtgcccgtttgggcaaccttgacggtatcagtgatgactggttcccttcagacaaccagcctcacggtgatggcctgtacagcgacaacgcctacctgcgtggtacgttccttctggtaacgggcgaggatatcaagacgaagttcgagatagtcgaggggaaaatcgtcagttccgtcaccgccctgcggaatgacttcgccaccgagcgcggctacctgaataaccccgcctttgataacggccttatgaagtggaacacggagaacgagaccgtgttcttccttgtgggcaaccggtggatctgggcgaacggtaacgtcttgacgaggaagggtgacagcgcgagcgtgaccgaggatgacggccgtacggttgtccggattcgtaacaagtacatcctccagaaacgtgagaacctgaaaagtattccctccatgcctgaaaatgacagtggggagaaggaagccgtcccggtgttcctgactttcttttaccgctgtgccaaggccggcacgctgcgtgtggagtttgtgggtgtggataagacaggctttgccaatttcaacagcatggaggtggaggaagaactgtccgcgaccgacgggtacgtacagtacacctgtagcggactctggaacggtacaggtgattttaaattgagttttaccggtgatatttacctgtatatgctcatattgagcaccgaccgtgtggaatccctgacacaccgttataaaacccttttcgagcagtcggagcgtctggtaaagatttcggcggcggtgttcgacaaagacgagaacctgctggaagagaccggcctgatggttacttccaaatattccgggttgtatgccattgacggtgatggaaatttgaaatcccttgtaggtgttgggggtgacggcgtaaaaatcaagggcgataatatcacgttggagggacttgttacggctaatgataatttcaagattctggaagacggtagtattgagacgcgcaacgccaagatttatggtacagtgtatgcctatgagggtaaaatcggcggttttacgattgattccggacggttgtactggaaagccggtgattatttcggcaatgattcccgcagtctgaaacttggtgtctcacaaacggacatggagggtattgtggatgtgtcctttaatgccgccacgcagggacgcttcggtgtcaaggccgtaggctcgaatctgggtggtgccgctatctatgcctccagcaagtcctctggtcaaagctatcctatcagtgccaatacttatgccggctattttgacggtggtgtgcatgtgaacggggcggtgtattgtggtgatatcctgtcgaacaattacggtacgggatggagcttggccagcgatgggacatacagttaccgaaagggtgtttcaggtaccttccagtgggctgtaaagagtgattttataacttataactatacccttgaggttgttaatggaattgtcgttaagatgacatatatctaaaaataaaggatatgaaagtaaattttaatgtgtattttaaggatttcgacggtagcgtgctgttgattgataagaaaccccagtgtatgggagtcatagtctcccagtgcctgttcaacggtaccggtttccgtccgagcggtaatattcagacggataatgaaaggaaattacatgcttacagtctttgcatgaggattatgggttccgatgcggatgtggatctgacatcggaggatgcggttttgataaaggaagctgtcaccggtcttactccgggctgttattcccaaatagtgaaacagatagaagggtaatggaggattagccatgacaaatgcggaaaaacaggagatcctgaacgctatcaaggccgagagccagagcgttgatgaacttgtggaggtcagctcccttgacaatatcaaaagtctccccgcccttcgcggcagtgagctggtgagtgctccgcttacccttttgcgtaaaccggccgatgatgccgctgccacggcgaatgcgtctgccacgaaagcggataatgctgcggctttggcgaataaagctgcgggtatggcgtctgatgcggccggtaccgccaatcaggctgctgaaactgcaaattccgccgcggcagcggcatccgcggctgcgaaacaggcggaggatgccgccgccggtgtgaacgatggtttggtcggtggcatgacggccgtccctgatgaggagaacgacacggtgaaactcaccctgctggggaagaccgggacggagattgcctccgttgatattcccggtggtacgggcggtggcggtaacacgtataatgtgacggcggaagtccctttggagagcggttattatgtcctttcctccgcgatcggtgccgtggatgagaaataccgttacaagggccgttgcatcacctatgaagtctcgcagggcaaatgggagaccaaacagttcgtggggacaagtctgtcgagctgggagcaggaggcgagctgggaggacttcggcggtgccggaacgatgaagagcctgacggtgaacggcgagaagaaagttcccgacagcgagggcaacgtggatctgaccatcgacaagctggaagtggacgagagcctggatgccgacagtaccaatcccgtccagaacaagaccgtcgccgccaaattccaggaggtggaagccggtaccgtgttcggcatgagcgcggaagtgagcgacgacgagagcagtgtccgccttgcgctgaccaacaagagcggggcggagatcgcgagcgttgacatcccggccggcagcggtggcggcggtgagtcctccaccaccaagatcgtgctgcttgccgagaccgacaagaaaaccgtgaaggaaggcggagcggtgaaacttacctatacctatgaccaccaggttgccggcggtgatgacaagggtagcagtaccggacagaaagcgaccgtcaccatccaggtgaagcgcgggacgaccaccacttattcctcctcgctgaaggaagtgagcaagggtacctatacccttgacctgaccaaatacctgctggtgggcacgagcgatatctacgtcattgccgagactaccgatcccaccacgggcaaggcgcagaagaagcaggcgtacgtgagcgtgaagagcgtcaccctgtccctttcctgcggttacaacctggcggccaccatccagaacggcggttacggtacctatgattccgcgagtataccctacgccgtgagcggtaccggcacgaaaaccgtcagcctgtacgtggacggtgtacagcagaacgcgcatacggtcacccgcagcggcacgacgaacggcagtttcgaggtttccatgaccggcctgtccgtggggcggcataccgcccagctggtggccgagatggaaactgacgacctcacgctgaaaagcgagagcatccatatcgacctgctgaaggccggaaccggcgcgcccttcatcggtttgaagctcattcatgccgacgggcatgtcctcggacgggacgagcatctggagccggtccttgaagccggccgctacgagaagctcactttcgactgggtggcctatgatcccgaccgtgtgcccgctgaagtggagttctggaaaaacggcgtcaagagcagtaccgtgagcgctccccgcagcatgatgacctacagtaaccggtttaccgaggaaggcacgcagacgcttgtcctgaaagccggtccgaccgggtacactttgcgcatcgacgtgggtgagagcggtatcgatatcagcgaggccacctacggcctggcggtcaagcttgacgcggcgggccgcagcaacggggagagtaaccccggaacatgggagtcgaacggcgtggagaccacgttcgagggttttgactggagcagcaacggctggacgggtgaggcgctgaagctgaccaacggtgcgaaagccgtcatcggctaccggccctttgccaccgatgtgaaaagtacggggctgaccattgaactgaccctccgggtaagcaatcccactgacagcgataccgcagttgtggactgtctcgacagtggcaaggggctttatatcaccccttcggaagcgagtttcaagaccggtgagaaagtgtcctataccaacgaggacgacgagctggtggagcgtgagatcaagctgggcacgaattatgtggaagaccggtggatcaaggtggccctcatggtgggtacccgcaatgagagccgtctgatggagctttatgtggacggcaaccgtaccggtgccgacatctacgacaacgccttcagcttccgccaggacaatccgaaatatatcaccattgacagcgccggggcggacgtggaggtaaagagcgtgcgtatctatacccgccggttgagtgacgacgaggaactggagaaccggatggtggacagtgcggacggtgaggagatgatcgcgctgtatgaggagaacgatatcctgggtgataccgacactgtggatatggacaagctgcgtgccaagggcaagggggtgctgcgtatcgtgcgccagaacaagctcgatgacgtgtatgccgagaacaacaagaagacggacttttcggcggatatcttctattactcccctttcggatccgaatacgacttcgtgcttcgtgactgttatatccgtattcagggtaccagttccacgaaatatccgagcaagaacatccgtatctatatcagcaagggcggcacgaaccttagcttcaccgttggcggcaaggagcaggcggaaaagaaatatcccgtccgtcccggtggcatcgccatgaacctgatctgtctgaagagtgattattccgactcgtccatgtcgctgaacacaggcggtgccaaactgttcaacgacgtgctgaaggagatggggcttctcacccctccgcagcgttaccagtacgagacgggcggcagcgatttgaacgcggtcaccgtgcgtaccgctatcgacggtgtgcctatcgacatgtttgtggcggctgcggaggacggcgagaacaactatgtggggcaatacaacttcaacaacgagaaaagcaagagcggcgacctgttcggccttagtggcgtggagggttacgatcctgcctgtcccctcactctggaaatgctgaacaataccgaggccatgtgccttttcaagaccacaagtgacgctcatctggaggaggtgtttgatgccggtgccgagaccaacgttccggatgatgtgaaatgggcgggccttgacgagtcgcagcgtacggccgtgaaacggctgtacgcatggatacgctcgtgtgttccggacggtgcgacgagcgccgacctctccacttttaagagcgagaagttcagggacgagataagtgactatttcgacaaggctttcctgctgacgtattacctctggacggactatttccttgccgttgaccagcgtgcgaagaacatgatgctgcgcacgtgggacggcctgatatggtacatcacctactacgacggtgatacccagatgggaaaacgtaacgactgtttcctggtgtatgactacaccaccgaccgcgacacttatgacgccgaggccgggaaatatgcctttgaaggccgtgacagctggctttggaacctcgttctggccaacctggacgctgacctgaagacacaggcgcaggctcttcgcggtgtacttaccaccagccgtgtcctggacatgctgaacgtggagcaggcgggcaactggtgcgaccgtgcctataacaagagcggcgagctgaagtacatcctgcccgccacgcaggagatgtacggcaaggtgtggccgttcatctacgcccttcagggcagtaaccgtgcgcaccgtgaatatttcgtgcgtaatcgtttcgcccttctggatgctaagtacggcacgagcaatttcaccagtgacaacatcgacctctatctggcacgtacggctgctgacacccccgacgtgctgaagattacggccaacgaggtttatgctttcggctacggtacgaacaacagcccgaatatagggaataccggcatcatcaagaaagatgcggctgcgagcctttccatcaccggtgcctatacggtgaacgatcccttgagggtttatggcgcgagccgtatgaaggtgctggatatgagcggggccgccgaccacctgaaaaacgctttcgacctgggcaaatgtaccgtgctgcgcgaactgaaccttcaaagttccggcaacggcagtaccggctggtggttgaacatcggcaactgcaagcagctacgtaaactcaaccttcgtaaccaggcacaggcgaaaaccgggggaagtaccagtaccgagctggatttgagtgcgcagaccaagctggaagaacttgaggcccgcggtacgcaggtgcagagcgtggtgctagccaagggttctcccgtgacgctgctccaccttcccggtacactgaccagcctccgtctggaatatctgggcagactgaccaccggcgggctgacattggaaagctacagcaaggtgaagaccttcatctttgacagttgtccaggtattgactgggaaaccctgctgggccgttgcacgggtgtggaacgtatcagagtaaccggtattgaccgcgaggatgacggtacgtggctggataagtttgtcgggatgggcggtgtggattccgatggcaacactacggacacgtgcgccttggtgggtacggtacagctcacgcgctacattgatgacgatacgtacagcgctctgaaggcgcacttcccggaactgaatatccggcagccggaatacacgatgatcgagttcgacgacgaggtatcggatgacgcgaacgtgagcaaccttgacaacggtaccggctacaagtatgacaacgcgtatgaggtgagcggtcatatttccgccatcctgaagcagcgtcaccgtgtacttgctaaagtgactaaaaaagcgacgacgcggggtgtgaacatggcgaacgttgataccacggtgaacaacctggacggtgagatgacctactacccgctggacgacacggacagcaacaagtacgccgacggcacggctgccagactggacggcactgaaggtgactggatgatgtacgagcccttcttctggagcaagggtatcaatgattacctgaacggcaagcattactcctgttacagcagtaacggttcggataacatgccttccgttccggatgctgacgtccttacgcttgacgacattaagggcacgagtggcggttatctttccggtcgtaagatcatgagcggaaaggatacgctttcgaacagctacagtactgacagtacgtattcggtatgcaaggtgaacgtggacggttacaagcgtgtgcgtttcccgagcgttcccggtacaagccttgtcggaagcattttcacagacgattccggcacggtcatcagttcaatcgtcgtccctaccttgagcaacaagttcgaggccggtatgtacctgattgccgatgttccggagggtgccactgctcttcacttctccattctgaacacggcagagttcgataaggttgtcctttctaacagtgacaggatcgaggatatggaacccgaatgggtgcctaatgacgagcacttgtgtgccgttgtgggcagcagtgttgtcggttccaaacttcgcgcctgcattaccggcgggagcactacggcgagcatgacctgggctgatttccactattacagtgtccagcgcggtatgcagcagattgatgcccttatgcactcgcgcatcgcgaatcttttctacgcgaagtacggtcgtcgtgacagccaggaacaatgcggcgcgggctctcacacgaacaaccgtactacgggtggtactgccagccgcggtatgacggacacgatcggctacgaggaagcctcctcaatcaaccctaatgtgacgaacagcctgatagaaaactccgtccaccagtatgcgtggtaccgtgagaaggatgactacggcggggccacggttacgcaggtgaataatatttgctgccttggctacgaggacatctatggtcataaatatgacatgatggacggcgtggatcttcctaatgacacgggcaattccgggaagtggcgcatctggatgcctgacggcagtacccgcctggttaagggttccgtgagctccggtatctggattaccgccgtggcgcatggcaaatatatggacgtgattccggtgggttccgtttcgggttcctcctcgacaaattactgcgacatctactacatatccactgcctccagccgtgtggtctatcgtggcaacaaccacgcgagcccgaatggcggtgtttcgatgtcgtatgcgaactacgattcctcgtatacgagcacgtacatcggttctcgtctggccttccgcggccggctcgttaaggcgtcgagcgccgtggcgtttaaagcgataagcgaggttgcatgatcggccgcgtaaagcgtcaaagcgggagcgaagcgacaaaacatccggtgttccccgagcaggggaacgccgttcattacgggcgtcagcccgtcgaaaaatatttttttgacgtcaggttttgtatctgtttgttaaataataatttgaaaatagtacttttgcatttgaaaggtggcgcctccccataggccgtgtggtctatcgtggcaacaacaacgcgaacccgaatggcggtgtttcgatgtcgaatgcgaacaacgattcctcgaatacgaacacgaacatcggttctcgtctgaacaacaatcgaaaggaaattttaatcggcgtacaacaccggggacttgtccccaccgtggtgccgaggggggcaagccgcagtaacagcggtccgtaagggccggaaaactgaaaaacagagtgtcgggtagggtttggtaggccggaaacggttcgaagaagccgggcccgggggattgaaggccccaagaaaaacagttatgcgcagagaaggttatattatcgaggagatagcggattactccaacatgtcggagtcgttcaatcaggtccttcgcggaacgtcacgtaaacgaagccgccagggacgctacctgcttgcgcatagggaggaagttataaaggaacttgcagaacgtatatcagacggctctttccgtgtcagcggttatcgtgaacggactatctgggaatatggaaaggcaaggaatttgcagattcttacgatgtatgaccgtatcggagtacatgccatcatgaccgtagtggacaaacacctgcgcaggcgctttatacgtacaacgtcggcatctatccagggacgcggcacccatgacctgatgaagttcatctgtcgtgacatggaaacggatccggaagggacagggtatggttataagtttgacattcaccatttttatgacaatgtacgtcaggattttgctatgtggtgctttgcccgtgttttcaaggacaagaaactgcttggaattctcaattcctttataatgatgcttgacagcggtatcagtttcgggcttagaagctcgcaggctaccggtaatttactcctgtctatttttttagaccattatttgaaggataagtacagtgtccgtcatttctatcgttattgtgatgacggtcttgtacttggtaaaacgaaagcggaactgtggatgattcgtgatgctgtccactcacaaatggaacggatagggcttcagataaaatctgacgagcgcgtgttcccggtggaagagggcatcgattttctcggttatgtgatttatggtccggagcatgtccgtatccgtaaacgcatcaagcagaaattcgcccgaaaaatgcacgaggtaaaatcgagaagaagaaggcgtgaactggtagcgtcattctatggaatggccaaacacgccgactgtcatacgttgtttaaaaaattaacaggcaaagacatgagatcatttaaagacttgaacgtttcctacaagccggaggacggcaagaaacgttttcccggggtggtggtaagcatccgggagctggtaaacttaccgattgtggtgaaggactttgagacgggcatcaagaccgaacagggcgaggaccgctgtatcgtggctattgagatgaacggcgaaccgaaaaagttcttcaccaacagcgaggagatgaagaacatcctcttgcaagtgaaggatatgcccgacggctttccgttcgagaccaccatcaagacggaaactttcggcaagggtcgaactaaatacatatttacatgaaacgggtagaaggaacatccgggataagactgatcgagtgcgtgagcccggcacgtaacagatggcgcatccgctgggatgtgcaggaaagggaggacggctccgcctcctacatggaggagggtttcatcgggaaacccggtccggacactataaagtccgtcatcacgggctggtacaacgaccagaccgaccgggagatactttccgggtttgtctatgaggacatgccggtatggctgtcaagtgagaaccagttcaattataaggcagcgtatgatttggccgtacagaccggcggcgctatgctcccggtgacgttcaagttcgggacggatgaggagccccagtaccggacgtttgagaatctggaggaactgacggacttctacacgaaggccatgaagcacatccaggatacactggctgacggctggagaaagaaagacgcttttgatccggaagattaccgggtggaatgaacccttcgggggagggaagaaaaaagcccccggcctgttaaatagtaacgccaatcacttttttaacacacgacgagagaactcgcgcgaccgggggcaaataccctctgtcacgagttctctctttttatgtgtttaaaaaatgattggcgatgcaaagatataatttttttgttgtatgaaagtgattgagatattaaactttaaccgggaactgttgaaaaggcttcaagcatccggaatccgtctggaggatgcccggtatattgatttgtattcagactatacccgcctactggatcagggtgagaaagtttcgtatgtcgtggccgtattgtccgaaaagtattcggtgagcgagcgcaaggtgtacgcgctggtgaaacggttccagagcgactgcaagacgcttgcagtgtgaacaggcagtcttatgccacaaggagtgccgtttccccttatctttagggagtttcaaatttagaaggaggaaatggctatgaataagtattaccgcatcctggacaagatccttgccacgggaaagacacagaccaacaagaagggaaacatacagtaccttctgaacgagcagctctcgctgacaccggcagacctgctcgatatattcgaagggcatcatatcgcccgcaagaagctccgcagcgagttgcagttatttatgcagggtgagcgcaacgtggagaagtaccgggaggccggcatcaactggtgggactattgcggctccatcctggtgaacagttacccgacctatttcgagaagctgcctccgttgatagcgaaaatcaaccgggagaggcgcaacagcaagaactacgtgcttttcctgggcgaaaccggtgccgagagcaaccaggcaccctgtttgagtctggtacagttccagttagatggcggtgaactggttctatccgcctaccagcgtagcagtgacgcgaacctcgggctaccttccgatatttaccacttgtacctgatggcgcggcagatagaacttcccttgaagtcgatcaccctctacttgggaaatgtgcatatctacgagaacaatatccagggaacccgcgcactgcttgccggtgacgaggcggtccgcttcgggctgaacgtgtagtttgctgtatatgtcttgcagcgggaaccgttcatgtttcccgctgtttttcgtttattctggggacctttgcggccgttttaaagcagaatgaaatgaaaaagatgtatttgtccgccccgcttcctttcgtggggcagaaacgcatgtttgcgaaggattttatcagggtgctgggacagttcccgggcagcaccgtgtttgtggacctatttggcggctcgggcctgctgtcacatattaccaaatgtgtcaggcttgatgccgccgttgtgtataacgacttcgacaactaccgccggaggcttgcgaatatcccagccaccaatgtgctgttatccgatttgcgccggatagctgaaggggaacccagaaataaacgtataaccggggaggttcgcgataaaatgtttgcccgtattgagagggaagaaaaagagcacggctacgtggattatatcacggtttccgcatccttgttgttcgccatgaaatatgtgaccagtttggaaggaatgaagaaagaagccatctacaataggattcggcaaacagattatcccgaagcaaaggattatctggaaggactgactataaccagcgaagactacaaggaagtattcaaacgttacaaggatgttccgggtgtggtgttcctggttgatccgccgtacctttccaccgaggtgggtacttacgagatgtcctggcgtctggctgactacctggacgtgctgaccgttctgaaagggcattcgtttgtgtacttcacttcgaacaagtcctccattttagaactgtgcgactggatggaccgaaacccatttgtcggcagcccattcaaggaatgcaggaaagcggagtttagtgcaagcgtaaactatcaagctaaatatacagacatgatgctgtacacgaagccggatgaagtgtcaggtatagcagcctaacattgcataaagatagggaattattttgaatctgcaatggcttttaaatgatattttaaagccatttaaagagggttcaagtgaaagaaaaacggtgggctttgatcatgctgaataggaccgcgctcaccttttttcttgtacgcgtcgtttttgtactttttgaaacgcatcgtttttgttaagcggcacgtctggtttttccggatttatatggtgtgaaattccatgtgcgtacatctatttaccagaatcaaagtttgagagttcattttaatagaaatgaatcgttggagcaagtacttcaaatcattaaaatattggttcccggtatagaatatgaaattgttggcaagaatatctatttaagatagcggtttagtatttgttaacacaaaaccattgggtgtagtatttattttaattgtctttctcatgtacgtacaccttatgtcgttaataaatctaatatgaaatgaacaagaaatttattcgagtgttggggcttggtgttggcttatttctggccggcagcctctctgttaatgcacagaaagtttccttcaatggggaacgtctttctttaaaacaagcgtttgagaaaattgaatctgtttcgaagtataagattgcttataacacttcacaactggatgtcaataagcaagttgtcttgaatcaaaagaatcaggatgtattgcaaattctgtcggatttgctaaaaggaactaattgtgtctatcaagtgaatgacaattatattgttatcactctgaaagatgatgagaaggttaagaaaattaagggtactataaaagattcggccggggaacctattattggtgccaatgtaattttaaaaggagatgccactgtaggaagtattacagatatagatggtaactttgatttgtccgttccaagcaatgctactttgcaagtttcttatattggttataatactcaggatgttccggtcggaaataaatctttccttaatattactctgaaagaagatacggaaacattggatgaagtggtggttgtaggttatggctcgcagaagaaagtcaatgtgattggctctattgcatcagtggacagtaaagcattggaatctcgtgcagtgcctgacgtttctaatatgttgaccggtcagatgtcgggtgttaccattacacaggaaagcggtaatccgggacaggatgctggtactattcgtatccgtggtgtcggttcgtttggagcaactcctagtcctttggttctagtagatggacttcccggttctttgagtgatttgactccggccgatattgataatatttcagttctgaaggatgcctcttcagcagctatttatggttctcgtgctgccaatggtgttattttggtaacaaccaagaaaggaaaggaaggtaaagcccgtattatttataatggttccgtgggtatgagtcaggctacagaattgccggaattggctcattcttatgaatatgcagaattttataataaggcgattgggacagaaacctatacgcctgagatgattcagaagtatcgtgatggttctgaccctgacaactatgctgacgaaatgtatcttgatgatcttttgggcggtcatgcactgcaaaccaagcacgagttgagtgtaagtggtggtacggaaaaggtacaatatatggtatcattgggatatttgcgtcaaaatggtttgttggacaataactattataaccgttacaatgctcgtgtaaaccttggtgcggaattggctaagaacttgaaactacaagtgcgtctgagcggtatgacttctgatcgtcatgaaccttctactccgggttctttggatattggcggatttaaagggattatttctaatgccgttcgttttcccggtttaactccgacttacttgcagaatggtgaggtcggtttaggacctaaattgcaaggtacaccggtggcatgggtagactgtgcgtcttcatatcgtgaagactatgacaaatttaaaaataatattgaattgtcatatcagccgatagatggattgactttgaaaattttaggcggttataattatacattaagtcacgttcgccattatcgttgtgatatgattcttacgggtgacaagagtactggtccttctacattgagcgatgaaatgaagcgaactgtttataagaccttccaagctgtagctgattataataagtcttttggtaaacataatcttgctgcattggtaggatatacttgggaagatgaaggtcagcgtactttatcgggtagtcgtaataactttccgtctgatgacgtacctttcttaggggccggaggggcagacggtcagacaaatggaggtggaggatatgattgggctatacagtctgtcttcggtcgtttgacatataactatgatcagcgctatttatttgaaacaacaatgcgttatgatggctcttctcgttttccgacagatagcaaatatggttttttcccttctttggctgcaggttggcgtatctctgaagaacagttttggaaggaaaatgaaaatttgtctttcattaataatttaaaactgaaagcttcttacggtatattgggtaataataatatcggtaactatccttatcagtcggtatactctttagggcaagaacagaactatgtatttggcggagtgtacacacaaggagcagctgttactacttatgtggatccgggtttgaagtgggagcgtactcgtactaccgatgttggtattgagactgcattctttaataataagttgacatttaatgcttcttatttctatcgtaagactacagatgtattgtataagccggctgcaagttattcttcgattttcggattaagtgtatcgcaagtaaataccggtgagttggaaaataaaggttgggagtttgaaataggtcatcaaaatacaattggtaagttccattatcatattaatggtaatttctctattattgataataaggtattgacattgggtatgggaaatgtgacccagaacaatggtatggtaggtaacggtagcgatttgtttatcggttatccgatgcagatgttttatgggtataaaacggacggagtatttctgaccgatgatgaagtaggtgactggtatgatcagactgcgatagccaaaggttctaaagccggagatattcgttatgttgatattacaggtgatggcaaagtaacaccggatgacaaaacgttcttaggttctcgtatacctaaatatacttttggattgaatttcggtggagaatataaaggatttgatttcagtgtattgcttcagggagttgctaaggtgaaaggtatgttgtctgtttatgcaggtcatgcattctatcaggagggtaatattcagaaatggcaaatggagaattgctggaatgtgcagcaggataaccgttatcctgaatatcctcgcttggagattatgtcaaatgcaggtagcaataatacactgacttctgatttctgggtattggatgcttcttttctgaaagtacgtaatgttcagttaggttatacattacccgaacatatagttaaaaagtttggttccaccggtatgcgtttctatgtttctttagacaatcctttaaccttcaagggatatcgtaaaggctgggatcctgaaaacacaagtaataacggtcaatactatccaactatgtcaacttatactttgggcttaactttaaaattctaatgacttatgaaaagattaaaatatatagcttttactgttttattagcttcattttcattgcaatcatgtgatttggagcgttatccattgacagatttgtcggaagataatttttggactgatgataagaatgccgaattagctttaacttccttatatagaggtagtattacaaatggtttggaatatagtgtttcggacttttggtcttatcatggtatgttgtttatggaacatctgacagacaatgcttatgaccgtcgtggagaaaataatccattctttaatatttctagtggtaaactgttgaataataactcttttattaaaaactattggtcatcggcttataagcgtatcggtttatgtaaccgtttcttggagggtattgccaatgctcccgaatcagaacagaaaaccagaatgattgccgaagcccgctttttgcgtgccactcagtatcattatctggccagttattttaaggatgtacctttagtgaccaaaactttgacaggtgaagaggccaatatagttgaaaaggaaactcaggctaatatcttgtcatggtgtgtgacagagtttaaagagtcggcagctgatctgccccgttttaaagatattccgaatagcgaaacaggacgtgcttgcaaacaggctgctttagcattttggggcagaacttgtatgctgatgcaggattgggcaggtggagcagccgcttataaggaaattatcgattatggtgataactcaattcatcctgtgtatcgggaactgttccatccttcaaccggtgtaggcaacaaggagaatatttattatatatcctatcttgaaaactattttggttgcggtcttccacagcatattttgtctgcaaaagacgctggatggagtctgtctaatccttcggccggattatttgaatcttatgagtttaaagacggaactccgttcagttatgacgattcacgttacaacccggataatttaggtgagaaccgtgatccgcgtcttgattataccatctattataatggagcgacttttatgggtactgaatatcgcatgagtccggattatgaagcatcaaagaaagaacgtttggattattcttcagaagcatctaagactggttttatgtggcgtaaatattttgatgagaatccgatcaatgatttgaatagctatagtgcagtgactccggtaatcagatatgcagaagttttattgagctatttggaatgtttgattgaaagcgggcaggccattgatcaaacagtattgaatttgaccattaatcaggtgcgtggacgtgctgatgttaagatgccacctattacagaaactaattcagacaaattgcgcgaattactccgtaatgagcgtcgtgttgaattggcttttgaaggtatcagatattgggacttactgcgctggaaacttgctgaaacagtgcttgttggtgaggtatggggtgctccttatcctaaatctaccacttatgctggttctaccaagtttgtagatccaacaggacattgccgctggtatgtaggaagacgagattttcgtaatcctcaggattataaatggccgattcctttgtcagaacaaaatattaatcctaacttgcgtgagtaattctaacaataggaaaaagtgtgtcaaaaatgctatattaggtttttgacacaccttatctgactaaaatgttaaaatatcatgaaaaaacagtatttggctttatctctcttaacaccggtgttgtgttctgctctgactgtggaagctaggactcccaaagagaataaagtgaccaatcgtgagcagcccaatgtgattattattttggctgacgacttgggttatggtgatttggaatgttatggtgcaaagaatgtgcagactcccaatgtcaatcgtttggcgggtgaaggtattcgctttaccaatgctcacaccatagctgctaccagtaccccttcccgttactctttgttgactggtgaatatgcatggcgtcgtcctgataccgatgtggcagcaggaaatgccggtatgattattcgcccggaacaatatactatggcagatatgtttaaaaatgcgggatatactacttgtgcaatcggtaaatggcatttggggctgggagataaaacgggacaacaagactggaatgctccgcttcctgctgctttaggggatttagggtttgattatcattatatcatggcagcaacagccgaccgtgttccgtgtgtattcatagaaaatggtaaagtggcaaattatgatccttctgctcctatagaggttagttataaacaaaattttccgggtgagcctaccggtgctgatcattccgagttgctctataatcagaaaccgagtcacggacacgatatgtctattgtgaatggtatcagtcgtattggtttcatgaaaggtggtggtaaagctctttggaaagatgaaaatattgccgattctattactactcatgccattgacttcatcaaacagcataaagatgagcctttctttatgtattttgcaaccaatgacgttcatgttcctcgtttcccgcacgaccgcttccgtggaaagaatccgatgggtgtacgcggagatgctattgtacagtttgattggtcggtaggtcagattatggaaacactcgacaaactggggctagcggaaaatacattgattatcctgtctagtgacaatggtcctgtggtagatgatggttatgatgataaagcagaagaattgttgaacgggcatagtcctgccggtccgtggagagggaataaatacagtgcattcgaaggaggtactgccgttcctgctatcgtgcgttggcctaagaaaattaaggaaaatcgtgagtcggatgtcttgatgtcacagattgattggataagttctttgggggcactgatcaatgctagacttcccaagggtagtgctcctgatagttacaatcgtatcggtaatttgctgggaacagacaatgcagaccgtccttgggtaattgagcttgcttctaatcacgtgttgtctgttcgtaccaaagattggaaatacattgaaccgaatgatggtcctgcaatgatacagtggggacccaaaattgaaaccggtaattcaagtactccccaactttatgatatgaggaaagacataaatgaacgcgctaatatcatattacagcatcctaaggtggtatatgatatgcagaatatacttcgcagagtacgtaataaaaccataaagatggaataatagtttctaataaacaaaatttctatattaatgtgagttcgatataaatcaaaaaatagaaagttgtccgtcattgaccaaatttacgtcaatggcgggcttcttttcaaaaaagcagtatgccgcgataaccgacaaggagttggctataaagttactgaatgaacgatgtctggaatgttcaatctgtgcgatgttcttcagttcgtcattgaccgtttcaatcaaggctctttttcttagcaaaatcttgtcggcaatactcatcagtgagttcctcatattatttttaactttagtaacaagctgtatgccattaaggaaaaggttttcaaacagagcctgacctatgcacatagttttcctttgatgttttccagaaacttaccctgtttcaacggttcccggtcatccacgtttccaggcgtgaacatgaaattgaggatctctcctttgtcattgattatcagatgcagcttgaatccgaagaaccatcccatagaacatcttccacgctcggcaagcccttcaaatgtcttatgaatcaagattctttggttacggcatacacgtaagggaggggagtcaacgaaactgatgccggtacaggtttccagcagtacttttttgatgaagatggtcatgagaagcaatacttccttctccagttccacaaaacggttataggacacccggtgcggaaacaggtgttccaaatgtttgcagacatactctttgtaataatgcttgaagcagcggaaaccaccggagtggaacagaataagaatgaccatcatctccgcatcactcatccggttaggcttattacgatgtccgatcttcttgtcttcaatcatatatttttcctgttgaaacgaaaattccttgcaaaaatcatcggtcatacaataaatctctgtaactttagactttggaaacatagtggtaatcgtttaaatgttataattggacactataaatttaatgattttatcgctatgtttctaattgtcagaaaaatatatttattcttatatcgaattcacgttaaactactatgagtcatctttcccgaagttttaatggagtatttcgatatctccggttggcatgacgcccctgtaaaaatcgaagtctggcttgatgaaaaaactacttggaacgttccgattacaagagtggaactgtgatttcacatggttttacagatgagaaagttatttaggattttcctctttgtggcaaacctgtttatctctacgtaagacattgtcgagggtatgacaaagtttccacaatcgttgtttcacaacttccctttgtccaatgatataactatctgggaaagccggcaacaatcgctgatgcaagcatagaccgtttggtaagcaatatcaacaggatagagttaaagggggaatctctaaggagaaagaaaggaaaataatattatttttgtaagactcttatatagttataaaacaagtgtcaaccatggtactgtttaagcactatcatcagcgataactgaatatgaacagtacctgaagatactatcaaatttcgttgaatagaataaatatgaaaagaaggtgtgcattttgacacaccttccatatctacaaaagggattgtcggttcacgacctcatttcaaataaataataagaggaattccactcctctcataccttctcctgttttcccgcctctctctttttctccatatccttttcaaccagggttgtgatcaccctggaaggggaggaattatggatatacatgaacaatcccggattttctttcagggcgacaatcaccgccttctcgcagggttcctctatatatctgaccgtctcacaatcttgtgacaccgcacttatctgtagtttttcagatggtctggatatatacatgatattgtccgcacaggcgctgaccgccgcatacctgaccttttccgtcggggagccgatataaatgaaaagctccggatcggccgtgacagcccttatctgaaccttctcggtgggatgttcaatgaatatgatggagccgcagtcactctccacagcctgcatctggaggtttccggacgggttatccatatagatgatctgtccgctgtcactcttcagcacctcggactttaccttttccgtcggtttgttgatatacaggaacactcctgtatccttcctgaccgcttccagctgtaccttctcggatggcgcatcaagaagcatgatcagggaggcgtcctttctgaccacctccagctgcaccttttcagacggcgtgctgatgaattgtatcatctccggattttgtctgacaacatacagctgggctgcctcggacgggcgttccatgctcattatctccatcggatctttcctcaccttccgcaaatctgctccggacagattgtcaatcaatcttttcaatatattttttttcatctttatacttctcttttcttcagtctttgatcatatttcctgagcggcagctgaatgaacctgtttggcgatctggaaggccttcagaccgtagcccgccggtcccttgacaatagcgaacaccgagtttcccgatgctccgggcaaagcggtcttgttacctttcaacatctcgctcatggcctttccggataccctgcctatgtcaaccccgtgggccctcatgtctttcaggatatccgtcgcgtcaaaactctccccgttggtacggagcaccgcacttccgttccttattgtcagttcacggcggccgcccttgaacctcatttctccggaggatggttgcgcttccgttgcttccgttttctccacgacaacagtcttttccggaacagcggaagtttccaggaccgcctctttcctgaacgtgccgactgccgcggaaatttttcttgtacggtaggcttccgccttttccgtcgcttcgtatctggcgtcgtaggtgtccatatgcccggcatcccgcataagctctccatatctctcctctatttccccgagcctggtaaaaagattctttaccgcttctgaaatgtcctccttgaaatggatgcctgcggttcctccgggcatgacggaaccgagacatgacaggcatgcctgccgggacgggttctttatcctcaggatgtttgccggactgtcatgcaccgccatcagctggactttctccgtgggattcttgatatggcctatcagggaggaatttctgccaacggccagcatctgtgccttttccgtgggggttctcacgagtcttatcagggaggcgtccccgttaaggacagacagctgtactttttccgccggttcgctgataaaccttatcagttccggatcctgtccgaccgcatacaactgggccttccagtcgggtacgcttatctcccggatgagatgcgggtccttcctgacaacggagagctgcgtgtttgcggaagggctgccgatggcggtgatcagtccggaatccgccatcacagccagcagctgtgccctctcgcatggattttccagaagggtgatcatttccggattccgtctgacgaccagcagctgcatcttttccgtgggttcatggatatagcgtatcatttccggattttcggctatggcggccagacagaccttttctgtcggctcacggagctggagcagacagtccgccttttgtctgacagcggccagctgtacctcttccgtaggattgtccagaaccgaaaccagatccggattctgccggacggcggccagctgcatcttctctgacggattctcgaccgcggtgatcaattgcgggttttttcccagttccctgagctgggcacgtcttataaaaaaatctgttattctcatatatgtatgcccgtcatgccggtggctcagcgtttggttatcataattctctttgaactgatgaggaaatttttccgctgatgtccgctatgcgcacaccgtagccggagggctgtttccggatagagaacagcattttctgttttgcagggttcaggacggtcccccggccccgtaacatgctttcccattggctgccggatatgttcttgacatctattccggctttttccagccccttcaatatgccggtcgcgtcatattggttcccgttggtacgtatgaccgcgcctgcggatgtgatctctatctcacgacggccgcccttgaaaagaagagggggcgtcatgctcttgtccggcgcggctgctttctcataatggttgattgtgaccttgctgcctgccttgattatactacggagatgcgtatccagatcgacgtgacggaacgaggctgtcatgaccggcgtgccgtctttttccgacaccgctttccttgcgcatacgccaagtacctcatggagtctttccgcatcctgattatatgccttgtattcatcccccacacggataagggccattgcatccgaatattgttctttcgagcggttatacatatcgagaatgccggaagagaccgtttcgttgtttccttcttcttttatgggaagtggggatatgtcctcttccctggcggatgtgtctgccagggtgtgctgtttttccacactttcctctatcatggcggatgccttgccggcctcccgtaacacactcatgacatagccggggtcctccttcaaatttgacagccagcttttcagatactgtgcgttctcctttctcggagttacggctattcccagatccctgcctgtgacggcagcagtgaattcggcgatgatttcctcccgggcatatccgcacgttccgaacgggtgatgcaggccgcggtccagtcgtgaggaatgcccggtggagtgggccatttcgtgaagggcggtcatctggaatgattccatgtccttgaattgtcccggagtcggaagaacgatcctgtctttggacgggctgtaatatgccctgtcctgcaccttcagttctatgggacagagccatttctgttcctttatcattttatccagccaggggttcccgtttccttttacgttgtccactacggcaggaccggagaatctgaccctcatgtcctcatatcgctccggatatttttctttgaaatccgtctggtctatgttgaatacatagaaatgtttcatgaagggagtcaccttatattcctgcttctgaagttccgggaggcttttgtaatcatcgaagctgattttttctcccgtcgtcttatgcttcacggtgatatcgtaaaaagtcacgggaagggcgtgcgatccttttatgaccatcaggttctcatccttcagctgacggaaggtcatgaataccgggagggtgtatcccatcctgtccatctccatgtagagcataagacggttcatgctgttgtacggacgccctgatatgttctgtggcaggccggtacggggggtgaaccagggcttctgccattcaccggcggacatctgcctgatcttgtcaatcatcagttccgcatatctttccagtaccttcccgttcatggcagcagttcctgataaagtctttcctcgtattccttcaaaaaacgcaccgcatccgctgctgtgggacaggtgatgccattgccccgggcatagtccgaaaacggttccttcaattccgggttgagcatgacataaccaagcatgtccaattccccgttttccactttgtgtatcaattccatttcttccattgtgtattttttataattgacgggacaaatgtaagggcggcccagtataacgtttttatactctttgtcatttttctgtagtttttttggctgttccaaatattatttccatatttgcagtgccaaataatcacggaaaattcgtgccgcgagcttcggttaatgctcaaagttcaaagaaatacaatgggccttttatgcccagcacactatcttttgcttacaatagcaaaatgatatataagaaattgtagaagtcacaacttattgtgaacaactgcggctgcttttcccattacaattttagctctcgggcgaaaatctgtgattgtttggcgacacgggaaatggcagccgttttttctgtctagtaaacgccaaataatcacagtcatgaaacaaacagtttctatttttgctcccgacataaatgtcgctagtaaatcttcagctattcaattatggctgaaccgtaaaaaccaattcttttcttctgtacttgaagaggatgtatccaaccgccaggtcctgctgcttggtcatgcttcctttgttttctctgcattaatatgcgcatctttcgtatcacaggttcccgctctgatttgtctggcctggttcatggtggcattacggctttgtgtgaaaggaggcttgggatgaagttcattatagagccttccgcggcttccggtatgatccgtcttcctttgaaaaaagaaatgaaaattccttcgttatgggagattatggtatcaaaatattttagtgttaaaatatataaatattaaagcattaaaacatcaaaatattggaaaagagaattattttccttaacttcgtaacatactaaaaaacaaatagatatggtgaaaattatagcagtccataatcagaagggtggagttggcaagactactaccactaccaatgtggggttcgaactggcacgaaaaggatacaaggtccttcttgctgatttggatccgcaagccactctgacctcggctttgggggtgacagatccggaagaaacggttttctcggccttgcagggtgcggtggatggcaaggaaacgcggcttccatggatacggttgcaggagaatatatccttgtgcccgtcatgcaggaaaatggcggatgcggagtatcttctgcagaacgaatacgggagggaaaacttccttaaagaactggctgccagaacggatggagggtacgattttgtgctccttgactgcccgccggctgttggactgatcacggtcaacgcgcttgtggccgctaccgacctgattataccggtgcaaccggaagtggcttctttatatggtctggtttccatcctggatacggttgctgtgatacggaggaagatcaacagaagactgaacctgctcggcatgctggtgacacagtatgacagaaggactacattgcatgcggagatattggaagcgatgcggaaacagtacggggaaacggtcttttccacggtcatcagccgttccatcagggtggcagagtccatgagcagaaagacggatgtcgtatcttacagcaggaacagcagtggagcggcggactaccggtcccttacccgggagatcctgtccagattgaatatggttgacaacaaataaaagtaaaaaagaatatgggaaaatttattggaattgacgagattctgcagggcggaacaccaaaccgtcccacacactccactccggaggaggggaagaaaggggaagtactggccagaacctcactggagtatccgttggaactgcaccgcaaggtgaaaaaatacgcggtggacgctggaatgaaggagaagcaggtcatagcacaggctatacgggaattcttcgagagagtggagaaagaataaagaacataaaattgaagaaaatgaagacattcggatatttgttgatggcggtcatggcgtgcatgacatgttcctgccgggatgaggaaccactgccggacccggtacctcccgtagtggagccggaaaatcccggaaacccggaagagccggatacgggaaaggtgtacctcggcatcgcccctatcatcgagaacatgcaggaacagagggccgtggtggagaactggaaggaggggcattgcctgggagtgacagctgcaggggatgtgaacatacccttcacttttgacggtaggcggtggaaagccggaaaacaggtggaggtgacggctgagcagaaagtgtccgcctattatccttataatgtacaatatacggacatgaccgccatacctgtggacatcacgacacaggaggattatatgtatggagaaggaggagtaagcgttgagaagccgagcgcggcccttgtaatgaagcatgctctctccctggtcaggatcctgataaaaaagaatgattatacaggtgacgggatggtggatgcggtcacttttggaggtgtaaggctgtctgcgtccatggatgtcacgtccggaaagctccttccgacaggacagcccggagaatataaggccggagggaactacacactggacgatgcctctccggtatatgtggaggcaatcctgatgcctgtgggtacggctgagggtatcactgtcaatgtacatgtggacgggagggatttcacctatgccctgccgcctacccatgtgtggaatcccggcatgatctatacttacactctgaatatgaaatccggttataactgtgaggtggacgtggaccatgtgccgatggatgaggagtattggagcactttcggaaagaccgaccggattgtcatgagggattgcgggacggacaggatttatatatggccgaattatacggaatatggctatgacacctataccggtgagggtaaggtctggggattctttttgcggtatagaaaccgtggaggtggggaagacttcgccggacaggcacggttcgtgctgatggatgggaacaggattgtggaacagtaccagccgtttgatatcaaatgcggaaacggtgcatgggacggatactgcaagtattgttatgtgcaggctgtgccgggaacataccggctggcagtgctgttcaaaaagaacggggagtcagcctggttcaagccttacggatacgatcagaattccaatgacggggaatggatgtatgaggtgagaccggccactgatatgccggcacttcggatgataacattggagaaccagaaatgcaatacgtttctggtatatcctgtacctgataatgactggttcaatatagtctatacgctttcaaacaaaagcaggaaagccatgaaagggactataaaggttgtatgggagagggagttcaaactggaatccaactcctacagaccgagtgataaaaaggagaacaagattgatgactatgaatggcgcgatgaactgggaagctgcactgttgacatagcggcaggagtacgtttctggaaagggatagtgtcttgcaagttcccggtccagagaaaagagccgagagatgctaccagcggtgtcggttattgcgcttcaatggtacatctgtattaccagctggaaggaagcagtgagtggaagcttctgcggtgtgacacggaatacctgttcaatcggaattatccgggctccgagtctgcaaaaatggatgaagcgttcaattatctctatatcgctccggaaagttggagtaggaaacagtaatatataaactttcaaaagcaggaaaaatggaatggcatggactgtttgacagcctggcagggaggctgcaggaaggatggccgcaggttgtccggactatacaggacggaaacttcggggagctcctgcagcagcctgcaatgatcatggctgcggcgggactgctccagctggcggcactcgtggtgctggtgaggatgagacttctgggacccgtcctgaaattcaccgggtttgtattgatagccggaatagtccggctgatggtagcagccatcagggattccatgcgctggtagtaccgaaaaggggcgtatcagagctcagtccttgataatatgaacctgtaatttgaaatttgagcatcctgaaaagattaaaaaaaggatcgtatcattactcaataaagagtctgatatggtccttttaagcgttataattagtaaccgtaacttttcggagctgtcattttagttttgaagtacctcttttcctatcacaggaacatggtaaaaaacatacaataaaaagattgtgctcttgccgcttccgggctggccgggaacagggtagaatctgggtagcaaatgttttctccacccttttgaaggagaaaaagtatggacagacggtcttgcaatcgctccgttccggtgttttatcttgagttttgttatgttttttctattttctaccattgttctaccagtagggcggggaaagtaatgatatcacacttttatcaaggaattacatatagaatgcaggggtatattggtcagatttagtatctttgcaaaaaatggtactgatatggaggacaagttgatttcccgatatgatattttagtgaaccggtacaaggaacttgtatctgagaagctgagcaggaaagattttatagaatacaatgaaattctattctcggcgcatagctgtgctatagaggggaacagtttttcagtggacgagacccgcaccttgaaagaaaaagggctgggcatgatccccaaaggcaagaccttgctggaggcatttgaaatcctggatcatttccaggcttatgaatatcttctgaagaatttggacaggccgctgaccgaggaactcctgaaggaaacccaccggctgctgacggaacataccctctcttacaagacccaatacgatgaaataccgtccaacccgggagaatatacaacagtggacatgtgtgccggtgatacgatatttggggaccatgagcagctgataaagcaggttccccgcctgttgcaaagcacccagcaggtcctggactccgggaagatccatccgatgatcatcgcggcaagatttcatggattttatgaatatctgcatcccttccgggacggaaacggtcgtttgggacgtctgatgtccaattttatattgctcaaaaaagaacagccgctgctgataatccccggttcgcagagagaggaatatatcaccgccttaaaatatatcaaaaaagagcgtacagatgaatttctgatagattttttcttccggacatccataaaacggatggaacaggaaatagaggaaaaaaagaatctcacggagaattttatcagggggatggaatttgttagaaatgtaaaatcatccaatgatgacatttcagaaatctaatattacattctgacagtccgaacagtactttgcaggcgaacttttcaaaagccggtaaaacgttctatttctccatccggacaggaagaggcaaactggatgtctttgatgaacgtggtgaaaccacattgctgccatctgcttcagaaatagtattgaatctttcaccggatgatgaaaacttggaacgaggtggttacctgatatctccagagccggaatccggttggaaatatggagaggatgaatggtatgtgaatggcaacgggataccctccggacaatatggtcaatatttatttacgtacaatgattacagccgttatcctgatggaagcagattcgtatacgatttcaaagcggacaatcctataaaggtgactatacagactggcatgtggagtaacaattctttctccttgtatacgcacggtgatttcagaattggcttttctgctaccggtctgagttccggtcagcaaacccgtgagttctcatatggagaccgggtaacaatatatgcggatggtgcggattatgccgtaccgggagaaggtgaccgctggagatataactatctgagaggtttctttactaccggatggcaggctttggacgatcttggggaatactcccagacatcagccggttcatattcatttacagcgacaaaggatataactattaacattgtattcatgcccactatcagataaaatacaagggctgtcttaaaaaaatgacttgacagcctcttgttatgatagcctttatcttgtcatacaaaataaaaaaggacctgtaacagaagttaatgtgcaacagattttggttttacgcacaaaataggcggaattcctgcctatttttataagtgtggaaacattctacatcagaccacactatatgaggattatttccattttttacataataaaaaaatgacaattgactgataatcagaataaatattcttttggcatgggaattgtcctatcattatcgtaaaacaataaccattaaaaatataagattatgaaaaaattttttgttgcagtagcattggtaatgggattaggaacaacagtggcatttgccgaaaatttgacctcaggtgttgaaacagtcatggcagtaaatgatttcacccctattgaagtgaaagaccttccggcagcggtaacggaagcaattgccaaaaattttgcggaatcaaccgtcaaggaagcggcggtggaagcggcagaggatggcagcaagacttatcaggttgttctgacagacaaggagggagctgaaagtacggtgttcttcaatgagaaaggtgaaatactgaaataatatattttgcgtctttcttgataaagaactgaatttgccctcataagaagagaacagttcttatcaaaagatacagggtctttataaataatttcattcataaagattgtcgttttttactaatattgaaccgtttttacaggagcaactgtccgagatgaacagttgctctttttaatttttatgttgccgttcataactgccagtacattgtgaaaatctattttaagtatccaatagtttggcagagaaagatgaggtgtcaaaacactgacataacctcatctgtaatgcgaaattagatcaaaaaatatacctatagtttccaattaccttatcaactttgccaacatttgaaataggttcattggagcaaacagtgacaccatccacaaccaaagtgaatgatttttctttgctggtcatgctctcagacacctcaccgttatatctgtcataactatccaatcgtgatgctggagatcccgatgtgtgtagatactaattgaaaagtgcgctgtattctaattgaaaagagctccatccataacttgttacaaaattactataagtttaaaatattcatttatcttgtctcattttttgtgtttccttaagcctataagacagtccggtcatattaaccagataagctttatgtgtaagcctgtcaaccattgccgccacaagcaccttgtcctttatgatttcattccatctgttaaaagccaaattagtagtaatgattgtagccttttttccggctcttaacgacaggtggttaaaaagcagttctcctccttccttgtcacaactgacatatccgaactcatcacagatgaccagatcgtatttttcaaaccttaattgtagcgtcctcagtgtctttgctgatttagcctcccttatctgggtaagcaggaccggcactgaagtaaacaatacggtaaagtcctgttggcaggcctttattcctaaagccgtagcaatatgcgtctttcccgttcccggatttccatacaggaccaggtttcttccctgtctgatgaagtccagtgtctccaattcaggtaatattacctgtgcctctttgggcatgtcttccataacaagctcatgcagatacttcatttgtggaaatcccgcagatcttatccttgatcttcttctacactcccttctcctggcgctttcctttccaagcaattccgtcaagaactgcagatggttccagttttcttcagctgccaatgaaagggtgcattccagttcctctttaaaggccagaagcttcagttctgcagcatagtcataaatggtttctttttctgatttcatatattataaacttaaatggttggtattatatcatgcacttcattgtatcctgtcatgagcgccgtgatgccttcaagcatatccacagcttctctttctatattctcctgttgtgccgggagaacaggcggttccatggtttcttctgtctctccctgtacgctaccatgcagcatggcctttacctggtccggagatatctttctgacaccacgtccggtcagctccttgcatgccgtgacaatgtccgttccggaaaatccattttttcgggcatagtccagcaacagaacaaacgtcctgttgtcctccttgaaatggatgtcatacagccttctcagttcttccggtgctctttgccaaaccacagagtggggcaatgcccccggtttacgggaaagtgtacgcaaatagtgctccagcttgatgcaccagtctccaccgcaataactgcgttgatgagaggccactttctccttcccgtacaggatgacgattttttcactataaaccttgacatgtactttttctcccacaagagaatcaggtacggaataatgaacatttttcatgctgatagttgaccatttatccacaatgtactcatagacctcaaaacagcccagattaccgggaaaaggcttcagcgatgacaggtcagcttccagacgtgatgttttctccgctgttgaaagactgccttgctcgttgttgacctgcatacatacccggtttaaatgctcctgggcagaatgtatatcaccaaaatggtctgtcaggcagaaagctttccttctgacatattccacgctgcgctccacatgtcctttctcccatccggcccgtacattacagaaacggtactcaaaacaatagaaaccggacatcttcatcaaagcttctgtaggtttcttatcaccaccgacaaagctcttgacggctacacgcatattgtcatagaccatcatggcggggacaccatgtatatccctgaaaaagttacggtgggattccatgaaggcaagcgtattctgatgcctgaaaagataggcgtatctgccattgctatgcccgaaagtgaatacggccagataaaacttggttttgacgccgtcaataaaaagaagaacttcaccccagtcaaactcggcaatgcatccaggctcatagaacaaccggataaaggcttcgctctttttcttctctttgtatgactctatattttttatataactgcatactgtggcgtaactgatggtgtatccttgagataacagaaactggtggatatcctttttcaacatgcgctgtttgcgaagtccggtagctatcttaacggcattcttcttcaggcaaaatcctatcttatccttaatctcttgtgtgagccggcgaggacggcgtctggaactgtcatacctgggctggatggtaagcaaatcactcaaagcctcttctggattgtccgtgcggatggctgattcgtactttgaaagaatattgtcaacggtatgacggctgacatgaagttcacgagagatacgccgtttgctataaccgcatactctatacatgtgtattattgattgtctttctaccatagtcttcattttacctttgcatttggattatacaaaggtcattatacttatcctatggtggcgcaattttcaactggaatattggcgcacttttcaattagtatctacatgtaaggaagaattaaaagcaagacggaataacgaagttcctcatttactctttctttctaatttattgatcagtaagggcgtaactgtattacttgatgcacttaaaatattaaaagagaaagaatatacttttgtttgtcagtttgttggtggagaaacatcagagatgggtgcagtacagttttcagaagaagtggataaacggaatttgaatgataggattgcttatgtcggtcgaaaagtaggagaggaaaaggaggctttttttagacagtcagatgtctttgtttttccaacctattattataatgaatgtttccctttggtcattttggaagccatggaatataaactgccggtcatttccaccaatgaaggcggcatccccgatatggtgaaagatggagaaaatggcttgatttgtgaaaagcagaatccggtttcgttggctgattgtattgcgaagttgttggatgatgaggaattaagagttaaaatgggaagtgccggtcatgagaaattctgtcgggagtttactttggataaatttgaaaatagaatgagagacatactaaatcaaaatctgttttcatcctgacattagtaaataagaggaggaactatcaattcttatattactttcttgtttgaaagaataagaatccgtatatttgctatcgaagaatgatgtatggatatgaaaacgacttccgaatatatggcattattgcgtaagtacatggttgagaatgctcataagtatggcattatgcgcatgggaatcttcggttcggttgcacgtggcgagcaaaccgaagatagtgatgtggatgtatgtgtggaattgcaaactcccagtatgttttgtctggtccatataaaggacgagcttcagcatttgtttggttgtgccgttgatattgtcagattgcgtgaagatatggacaagttgctgaaacaaaatataatggaggaaggaatatatgcataagaaggatatggttgatgccatgttgggcaaaatagaacaggctattattcgtatattaaataattcccagtctattgattcgtaccattattacttgattactccggctggtatggaacggttggaaagtacttgtatgcttttaatggctgttggtgaaggcattaaaggtgtagataaaatgacaaataaaaatcttcttgttcattatccggaaatagattggaagggtgtcatgggaatgagggatattattgcccatcattattttgatttagatgcagcggttgtctttgaggtggtaaaaaataaccttccttccatgttgacaatcatcaaaaagatgaggacagagctcccgcttcatgaaatttagaatcttgttatatgtagacttcatagcctaacttggcgatgtgtaaacaaccagtagcgcatccacaatctcactccagcattctttgtccagcataaaataaggaatgctttccgcttcgccttccatccgtacaaacaaatgtcgcatggtgtctgtcggggcatattcgtaaaattccagttcctccacccggtatcctttcgcacggacccgggcaataacttcttgccgctccttgtcggacaggtttctgcctatctcgtaaagggagtgtaaagcattgctgtatccggtgtggatgcggtcatgaatagatggaaaatcttttaatcggctcatggcgttcgctgttgggccacaaaaataatataatattttagaactgccatattcatgttattgaagttgacaaatttgttcctggtggaaaatcgccaggggttggccgttttgccggaaggcaaactcctgatcaataccatcaacgcccattcctacaacaccgcccaaaaagacaggttctttgccgaagctttgcagcggggggatgtgttgatccctgacggggcaagcatcgtgaaggcgtgtcgttggctgaatgccaaatccaaacctgcggggcgcattgccggctgggatttgttcgaatttgaaatgaacaagctgaatcggaagggaggaaaatgttttttcatgggcagcagcgaaaaggtgctggcattgatcaaacggcgtgcagcggtggatttccctcacatcgaagtggaaacctattcgccaccctataagccggagttctcggaagaggataaccgggcgatagtcgaagctatcaacaaggcaaatccagatttgctctggatagggatgactgcccccaaacaggagaaatgggcgtacacgcattggaatgaattaaaaatccattgccattgcggaacgataggtgccgttttcgatttttatgctggaacggtaaagcgtgctcccgcctggtggcagaggcattctttggaatggtgttaccggttgttgaaagaaccccgccggatgtggaaacgttacattatcggcaatctgttgttcatgtggaatatatgtaaggagtagcttgatgaaaagaatcttattgcttgttttttggtgtagtgcttccttatgggccgatgcccaggcattgctgggaactaccggactgcttcatgctcccacggctgatatgcagcgtgataaaacgttcctgtttggtggaaactatttgaatactcatccattatccacccattttcgtagccgtgaggtggggtataccttcaattattacataaacataacgatgtttccctggctggaggtgtcgtatatctgtacattggtacatgcggatcacggctctgcttattttccggaacagtcttggggaaaattcacgaatcaggaccgggctttcagtgcgcgtctgcgcctttggaaagaagggtggtggaaggagtggactccgcaaatagtccttggtctggacgatcccacctctcatgccgatcatggcggtggggaactggtgtccggtaatacaagcggttccaataattacgctacacgctattatctggctgtaaccaaacatctgaattttcagaacataggtgaatggggtgttcatgccgcatttgtatatggtaatgccaaaggtatggagcattataaacgtccttcattcggcacaaactttcgttttgcttttcccgaaacatctataataagtaaggctgcgaatggcttgaacctgatggcggagtacgatgcaagaacttgcaatgtaggttttgagtatagtttttggaaagactatgtaaatcttgtagccgagctgaataatgggaaatacttctccggaggtcttgtctttaaagtccatctgaaataataaaaaagagcattcggttaggattttccggttagattttgttcctttgtagtacaatcagaaaaagtagcgcgccatgaagcaacagtcattgaagagatgcccgatagggatacagacttttgaggaaatcatcaacaaggattatctctatatagataagacggaatatgtttaccggatggcatacggtgcttccaaatattattttctgagccgcccccgacggttcggaaaatcgttgctgacctctacgctacactgctattttaccggaaagaaagaccttttcaagggacttgccatcgaaaagctggaaaccgagtggacggaatacccggtgcttcactttgacatgagcttggccaagcatgtggacaaggaaacattggaaagcatgctggatgtgcagctctttgaacatgagaaaatatacgggaagccggaaagggcggtcactctcaatgacaggatgaagacactcatcatgcgtgcctatgagcagaccggccgccaggtggtagtccttattgacgaatatgacgcacccttgctggatgtggtgcacgaggatgagaacctccccgtcctgcgtaatgtgatgcgtaatttctacagtccgttgaaggcgtgcgacccttatctgcgctttgtgttcctaaccggcatcaccaagttttcccagctcagcattttcagcgagctgaacaatatcaagaatattagcatggacgagccctacgctgccatttgcggtatcactaaagaggaaatgttggaacagatgggcgggtatatagaacgctttgccctttcgcaggagatgagcaaagaagataccctactgaaactgcaagagaaatatgacggctatcatttcacctggccttcgccagatgtttttaatccgttcagcctgctgaatgctttcgaagatggcaagttaaactcttattggtttggcagcggcacgcccacctatctgatagagatgctgcgcaagttccatgttcttccctctgaagtgggacacagcatgcaggctatggctgccagttttgatgcccctaccgagcggatgacaactattacgcctttgctctatcagagcggctatgtcacgataaaggactatgataaatataccgagctttacacgctggatattccgaacagggagatacgggtgggactgatgcagagtctgttgccgaactatctggcttacaataccgatatggggcttactaccataggccgtatgtatggtgcgatacgcttgggcgatatggatggagccttgcgtctgcttcaggagtttctctccaccgttccttattgcgataacacgaattatgaagggcattaccagcagttgttctacatcatcttctctcttttcggaatgtatgtggatgtggaagtccgtaccccgaagggacgtgtggacgtggtgatgcgcactgccgataccttgtatgtcattgaactgaaactaggcaaggatgccgatgccgccatgtctcagataaatttgaaaaactatcccgaacgttttaccctcagcggactgcctgtggtgaaagtgggcatcagctttgatgcggaggagcatacgttgggcgactggctcatagaaaaatagcccctgtcatcggtttcgtattaaattcagtggcggaacggtttgcgatatcaaatatttacgatatcaactagcaagctgctgataaaaatgaattcataaagatagaatattcactataggctgtgtgcgatgatgcatgcagcctttctctcttttgttgtcggtggcgaccggcatccgcaccatgatgtattgcaagaacgatggtcttcgtgactaccagcaggagatgaagctcaggctctttaaggagtgggagttccatcggagtgtcatggtacaaatgcctacaggcacaggaaagacacatctgctggcagcggtggtgaaagagtttctctgtggtatcggtaccggtacgcgggtgtggattgtggcgcatcgcagagagctggtggagcagatagaggaaaccgcagcccggtatggaatgggaaaagaaccggacaaaacgggaaagaacggaaagacggggaaagacagtatgccggaagaatccggaagggtgcgggtattctccatccagtggttgtcccgtaactggaagaatataggggaagctcccggattgattgtcattgacgaggcgcatcatgcactggcggagacttacagggagctttggaagagatatccggaggcgaggaaactgggcatgaccgccaccccctgccggctgaacggcaagggcttcacggatttgtttgatgcgctgataacttcgtggagcatcgcggaattcatcgggaaaggctggctgtcggctttcgactacgtgtctatccgtgcggacagcagggagcaacagataatagattcgttgaagaaacgtggggtggacggagattatcaggtgaaggaaatgaatgaggtgttgaaccgtcaggtcagcatccggcggttgtacgagagcgtcgagaggtatgccgccgggaaaaaaggaatggtgtatgccgtcagtatagcccatgcccgtcagatagccgcctgttacaatgcacacggagtgtcggctgtggctatcgacagcaaaacgcctgcttcggagcgtagggaactggtagagggcttcagacagggaaggatcagggtgctggtcaatgtggatatcttttccgagggcttcgactgtcccgatgtggagttcgtgcagctggctcgtcccacgctttcactggcgaaatacttgcaacaggtggggaggggattacggaaatcgggtgataaggaatcctgtatgctgatagataatgtggggttgcaccggatattcggtttgcccgtccgtgagcgggactgggaagcgatcttcgaggggcggatactgggtgacaccttttctcggaaaagagcggaaaacgggctgtccgtggcgtgttcgctcttggaggaaggcaggcgggaggaagaatgggaaatggtgatgacccatggacagttgctggatgcgatcaggaaccggaatttgtctgatcaggaagaggggcggaatgcactctctgttctgaaagctttccatgaccgatgtagcggattgtggggactgaggcgtagaaacagagtgacagtgatgcctcgatacaaggaagtgttcgacacctgtgcggaccgggcggcggtttgtttggaagatggccgtacaggggtggtggacgataacggaaagccgaagatcatcatagaccgctgccggaggttgcgattcctgaaaggggagcttctggccgttacgggcaatgatggtacggatgcttacatcgacttgaaaacggacaggacttatcgggagaagccggtggtgtgctcttacggtagcgtggaattgctgaaagtgggagagacctttcatagccgcacacggaaggcgtatgcttccatgcgcgggctgcataaggacagtctctgtttttatggcttttatctgaagataccggactatcgtgtcccgaaatcctgcaagttggcggatcctgtatggtctaccgtgttcgatgttttcgcttgtctgctggaaggggatgacgaggaggtgtattggtgctgtggtcgtctggcagaccggagcatcgtggtgatggacgggcaagggagttattatcatgtggagaaaggaaagaggaaacgatatatcgcctgtaataatcctgaggctggtgaggaggattttgactctgcggtgaagagattgaaggaagaggccgggcggcgtgcggaggaaatgaacctgttactgaaacggaatgaggaggagaaaagacggaagagactggaggagataggcgatgtccgtcctttccggatggggctgaaatgggggctgaagtcgggtgagcgtatcgtggttcctccttgttataggaacatctgtcctcccgtcggcggttattgtgtattcgaggagaatgcttgtcaatggggactgatggcaccggatggtaaggtggtggtggaggccagataccagaaagtggagatagagggggatgggacggtgcggctgacggttattccgggtaaggtgaaaacgataaaactttgaatacaactgattggtttcatataaccgttactgtttgagacaaaaataaggcatttagtgcagcccagcaaggcttgtccttgctgggctgctttttttatgaggaataaataggggatatttatgaaaacatgtaagaaaaaagggagtgaaaggaaatagttagtaataaaatgcttgctatcttattatatttgttacctttgtggatcttataatatgaaaaacaatgaaaataacaattctacagagaaatatagaatgggccaatccacaggccaatatagcaagggcggacgaagcgataagctgtctgccggatgctgatctgtttgttttacccgaaatgttttccaccggtttttgtacgcaacccgaaggaattgcggagagcgccgacagtgaaaccctgcactggatgaagcgtaaggcagccgagcggaattgtgctattgcaggcagtgtagcagtatgtgagaatggaaactattataatcgtttttactttgtccatccggatggagccgtgcagcattatgataagaaacatttgttcaccttcgggggcgaacacaagcgtttcactgccggcacagagcgtgtggtggtgaacttccgtggggtacgtattcttttggaagtatgttatgacctccgtttccctgtttggtcacgcaacctgggggattacgacatgatactttatgtggcaagctggcccactccccgtgtggatgcctggagcgcgctgcttcgggcgcgggctattgagaaccagtgctatgtggccggagtgaaccgcatgggagttgatcctgcctgtgaatattcgggtggcagcgccatcatcgatccctacggaaaaacgatagccgaatgtccgtggagcagggaaagtgcggtatcggctgatatagatatggaggcattgcaggctttcaggaagaaattcccggtattggatgatgcagacccctttacattgatatgaaacaattaacaaaataatagataatggctgaaaagaaattattgttgggcgatgaggcaattgccctcggagcgatacatgccggcatatcgggtgtatatgcctatccgggtacaccgtccactgaaatcacagagtttatccagaataatcctttggcaaaggaaagaaaattgcacagcacttggtgtaccaatgaaaaaacggccatggaggctgcattgggtatgtcatacgcaggaaaacgtgctttggtatgtatgaaacatgtaggcatgaacgtggctgccgatgcgtttgtcaattctgccataaccggcgtgaacggtggtctggtggtgctggctgccgatgacccttccatgcactcgtcacagaacgagcaggattcacgtttttatggaaaatttgctatgattcccatgctggaaccgtcttcccaacaagaagcatacgatatgatggattacgcatatacactctcggaaaaactgaagttgccggtgctgatgcgtgtggttacccgtctggcacattcgcgtgccggtgtggaagtagccgatatccgtgaggaaaatcagttgaatcctgaccatgaacgtgcccactgggtattgctgccgggtaatgcgcgtaaacaatatctggatctagtgaaaaagcaggagaagctggaagaagcttcctccaaatctccttataattatctggaagggttgaatcccgaatatgattatgaattcggagtgatagcctgtggtatcggttataattatgtgaaggaggcggatacggacagttgccatattccggtattgaaagtttcgcagtatccgttgccggctgaagaaatcaggacgatggcagaccgttgcggatatgttctggtagtggaagatggccagccgtttgtggaagagcaggtaaaagcgatactttcctcggactatgaggtaaagggacgcttgacggaaactttgccgcgtaccggtgaattgactccggataatgtgggcgaggcgatcggatggggaatcaaacgtccgtttggcaagtctcaggtggtgatgccgcgtccgcctgcattgtgtcagggatgtggtcatcgggatgtgtatgatgcattgaacaaggtggctgcggaatatccggatgcacgcattttcggtgatatcggttgctatacattaggtgcgttgcccccgttccgtgctatcgacagttgtgtggatatgggtgcttccataaccatggccaaaggtgcttccgatgcaggggtatttccggccattgctgttatcggtgactctaccttcactcattccggtatgaccggtctgctggatgcggtgaatgaccatgccaatatcacggtggtgatttcggataacctgactaccgccatgaccggcggacaggattctgccggtacgaacaaattcgaagcgatctgcctgggattaggagtggaacccgaacatgtgcgtgtggtggtcccgttgccgaagaatatggaagaaatcacccgtaccattcgtgaggaaatagaatataaaggggtgtctgtcattattccgcgcagagagtgtatccagacattgaatcgtaaactaagacagaaaaaagcagataaggcatgagaaaagatatcatactttcgggcgtaggaggacagggtatcctgactatcgctactattataggagaagctgctacggcagaaggcatcaatttgaagcaggccgaggtacacggtatgagccaacgcggaggagatgtacagtccaatctgcgtttgtccgacgaaacgatttattcggatctgatcgctcagggtgaggcggatctgattatttccatggaaccgatggaggcgttgcgttatctgccttacttgcaggaagaaggttgggtgattacttccgctaatcctttcaagaacattcccgactatcctgaagaagtggatctgatgagggctttggagagtcttccgcatgtggtgaagttggaaatagaggatatggcaaaagaaaacagtatgcctaaatgcgcgaatgtgattctgctgggcatggctgcgaagtatattgaaatcgtatcaccggaacagttgcgcgaaagcatagggcgtgtgtttgccgcaaaaggtgagaagattgttgaaatgaatcagaaggcttttgatataggcttgaatgcggtaaagaactggtaatgccatgaagatatttagtgaagaattagtggagaaggcggtgaaggaactgcacatcgccaatcttgcacaggctactatcggtgatgtgctgttggtagcccagtatctggaaaaggaaacggggattccttttatccgcatggatcagggatctcccggtcttgccgccaatcagatagggattgaagcggagaaagctgctttggacaggggagtcggatcgcaatatccggctgccgcaggagtgcccgagttgaaaaaggaggcttcccgttttgtaaaagctttcttgaatctggatatctctccgcgcgcttgtgtgcctaccaccgggtcggtggcgggttcattcggctcgttcatagcctgtacgcagcgtattccggggaaagacaaggtattgttcattgatcccggatttcctattcagaaatcccagcttcgcattatcggcgtggagtgggaagagtttgatatctatcattatcggggacaggccttgcgtgagaaattggaaagtttcctgagtaaaggcgatatagcagcgattatctattctaatccgaataatccggcatggatttgtctggaagaggaggaattgcagataatcggtgaactggcaactcggtatgatgtgattgtcatggaagatctggcttatttctgcatggacttccgtcgggatatggggcatcctttcgaaccgccttatccgcccactgtggcaagatatacggataattatattctgatgctttcttcttccaagatattcagttatgccggacagcgtatggcattggcatgtatcagcgacaaactgttcgaccgccagttccctgccttggcagaacggtataaagatgcaggggtgttcggtcctacgctgattgcttccattctttatatgattacttcgggatgtacggcttccactcagtatgcatacgctgaaatgctccgtctgtctaccgaaggtaaaatcaattttgtggaagatacccgcgaatatgcccgtcgtgcggaacgcatgaagaaaatatttaccgacaatggtttccatatcgtatatgattatgatgctacccaggtggtgggagatggtttcttctttaccataggttacggaaatatgacagggggtgaattgctccgggagttattgtattatggggtaagcagcatctcgctttctactaccggtagcgagcaggaaggtgtccgcgcctgtacgtcacggatgcgcgatgaactttatccggtgatggaggaacgcatgagagcttttcatgaagatcattgaaaataatgtgctaataggataatgtgccgattgccatacggtgggtttgtgcgccagtacattggctgattagcacattgaaaaattatttattatgatttggaataaaaataaagagtgcatgagtcgggacgagatgagcgctctgcagggaaaacgtctgaacaagttggtgaacttggtttatcataatgttcctttttatcgtaacaagatgcaggagatggatttgtctccggatgatatccagactatcgaagatatcgtaaaacttccttttactaccaagcaggatttacgtgataattatccatacggtcttcaggctgctcctgcttcggaaattgtacgtgtgcacgcttcttcggggacaaccgggaatcctaccattgtgggatatacgcgtcgtgacttgtctgtatggtccgaagtgatgtcacgttgtctttcagcatacggggttacccgtaatgataccttttctgtcagttatggctatggcttgtttacaggcgggttgggcgcacattatggggtggagaatctgggggcgactgttatcccggcttctacaggaaatacggaaaagcatgtccgtctgattcgcgacttgggtataacggggattgcctgtactccttcatacgctctttatctggcagaagtggtggaacgtatgggattgaccaagaatgatatcaatctccgtatcggagctttcggagccgagccatggacggaaagtatgcgtaaggagatagaagagcggctgggattgaaagggtataatatttatggattaagtgagattatgggacccggtgtttcctacgaatgtcaggagcaacatggttcgcatatcaatgaggatcatttttatcctgaaatcattaatcctgaaacgctggaacgtcttccggatggagaagtgggagaattggtgtttactaccttgacaaaggaggggatgccgttattgcgttatcgtacgaaggacttgacttccctgatggagggtgaatgtccgtgtggaagaaccaatatccgtatgtcgggtattgtaggccgtagtgacgatatgcttattatccgtggcatcaatgttttcccttctcaggtggaaagtgttattttggatatgcctcagtttgaacctcagtatatgctggtggtggataggaagaataatctcgactctttgcaagtacaagtggaagtccgcaaagacttcttctcggatgatatgggaagtatgcttgccatgaagaaagcgttgagcgacaaactgaaaagtgtcctttccatcagtgccgaagtgaagctgatggaacctaatagcattgcccgtagtgaaggtaagagtaaacgtgtgatagacaatcggattttaaaataaaaaagtatgcgatatgacaatcaagcaattatctgtttttctggaaaacaaaaccggaagaataaatgacgtaaccaagacattggcaaagtatgatatcaatatgcatgcgttcagcatggcggaatctactgatttcggtatacttcgcctgattgtttcggatgtggaaaaagcggtggaagtacttcgtgccgagaattttgccgtgatgctgaccgatgtggtatgtatcagttgcccgaatgtggcaggttctttggctaaagttttggactatctggcagcagagaatatctttattgaatatatgtatgcttttgctcaaggagatacggcacatgtggttatccgtccgtctaatgtggagagatgtgtggagatattgaataaattcaattgtaatgttttgactaagaacagtctgtaatgaatttgactttgtgggtatgaatgcatcacaagtctttttaccacaggttacttgggctcacacgggtgtttaagctgaaaactttaagattgaacctgtgcgaatccgggtaatctgtggctgttttgatggaacagtctatcaatagcaaaacctgtttgttggagaatgcagaatgttatgagcgttctttgacaatgggacactcgaaccgataaaaaataccgaagtattgtacatgattacattggataattttgaggactttgttccctataaaatatggatgcgtggggaagagtattatgaaacagacgctgtttccgaattggaagaaatctcacccggtgaatggactgcgactgtagaaggaacagacgattataatgtggagatatctatggatggaaacgagatagaatcctggtactgtgattgtccgtatgatggagaaatctgcaaacatgttgtagcgacattgttggcaattcgcgacaatagaaaaaaggcgggtaatagtattttctcgaagatgaaaatcaaagcggaggaagcccctgttttagaggaaataaaagaagtgggtaagcagccttgtccgtctttggtagacatacagcaactgttgtctttcattgatccgcaggaactctcgaaatttatctgtgagtatgcttcaacgaatctggaatttaaaacggcactttcaaatcatttcatagctaaggagttatctttgtcatcaaagggaaaagattacagaattgaaattcaaaaagtttttaaaggatctggttaccataaaaggtctcgttatcacaatcgttatgataattacgaccgtgactggaaaactattttcaatcagatggacacttttttggagaaagcggatttctttttgaatttggaagctatggataattctattgccatagctcttcaagtacttcgttccatcggtgaaaactatgatgatgaacttttgtatgatgatggtatttcttcttctgactattgtgaacaggcaggagatttgctcctgaaagtgattgaacatcctaaaaccactcaggcacaaaagatggagatacttcagggcttgcgtgagattgctgaaatatctatttttcgtgaatatgatctttatgatgtagacgaattgatgatgcagatcaatctttcgattcaaccggcagaaaaagcgttggaattgattgatgaacttcttgaagtaagaaagggaacctgtgatatctatcagttagtcattcgtaaggtcaatctgttgttagaacagaatgaagaacaaaaggcggatgatacgattcgtcaatatctttatctgactgaaatacgaagaatggaggttgataaattgattgcccgttgccaatatgatgaagccatttgtttgctgaatgacggaatagaaatagcggaaagagaaatgcattctggcactctgggtgaatggctgaaaatgaaattggatatttatgaaataacccatagggtttctgaggtaattgatacatgtcgtctgttgtttgtggtgggtagtgataaattgatatattacagcaaacttaaaactctggtaccgaaagaacaatggaaaagttttctggataggatgatgaaagaagccgagttaagtgactatttttcttttgtcggaaatgataaggctgaaatttatgtgaaagaaaaggataatgacagcttgttctctttgctgtcgtcagtccgatacaatcagttggaagcattgatgaaatatgcccattatttgaaggacactcattctgagaaattgattgctatatatacttctttattgaatgattatgctgaacggaatctgggacgggagcattatgaatttatagcacgggtattatcctgcatacgtaaactaaacggtggacaggctgttgtgaaaagcttggtggcagagttccggataaaatacaaacgtcgtccggcaatgatggaagtgttggggaagttttaaaaatagtttatcagaatcttttttaaaattagaaagccgcctcctccgaagcggctttccgtttttctatcagaacaaactccaagcaactgtcagtccggccattacaatggcgaccatactcatcagtttaatcagaatgttcaaactgggtccggatgtatctttaaacgggtcacctactgtgtcaccggtaaccgttgctttgtgtacttcgcttcctttacctccgaaattaccttcttctataaattttttcgcattatcccatgcgcctcccgcattggccataaaaatggcaagaacgaagcccgaggacaaaccacctatcagcagaccgataacaccgggaacaccaaaaatcagtccggtagcgataggggcaatgatagccagtagagaggggaataccatttcacgttgtgctcctttggtggatatttgtacgcaacgggcatagtcgggttctgcctctcctgtcagaatcccttttatttcacggaactggcgacgcacctcctctaccatgtgagcggctgctcggcctacggcgttcatggtcagaccgcagaacaggaatgccatcatactgcccaaaaacatgccgcttagcactttggggttcatcagggttacatcgtaataaagcatatagtcagtgaaactggcgttatgaacatttacggtaatgccgtttggtaattccagaatggtttgccccaaccgggttaatccgatacggatttcttctacataggatgccagcagggccaggccggtcagagctgcggagccgatggcaaaacctttgcctgtagcggcagtcgtgttacctaacgagtcgagggcgtcagtacgtttgcgtacttctttgcccagtccgctcatttcagcgttaccgccggcattgtctgcaatcggtccgtaagcatcggtagccaaggtgattcctaatgtcgaaagcatacctacggcagcgataccgatgccatacaatcccatggaaatattggcaaaatcaaatcctgaagcgagccagtaggacaagatgataccggttactactgccagtacagggatggtggtggaaaccatacctagtccgataccggaaatgataacggtggccggaccggtctttccactttcggccaaccgttgtgtgggtttatacgattgagaagtataatattcggtggaacggccgataacgatacctactattaatcccactaccacagcaaaggaaatgtttacccaattttccaaacctaatgcccaaaggataaggaaagtggcaacgacaatcagtaccgaacttaaattggttcctgtggccaatgatccgagtaattccttcattcctgcattttctttagtacggacggcaaaaataccgatgatagagagaacgatacccactgccgcaatcagcataggtgcgataaccgctttaaactgcatcacggtatcatccgagccaataaaagcggcagcacctaaagcggcggtagccagaatagagccgcaataggattcgtacagatcggcgcccattccggctacgtcacctacattgtctcccacattatcggcaatggttgcggggttgcggggatcatcttccggaatgccggcttccactttacctaccaggtcggcacctacatcggctgccttggtatagattccacctcctacacgggcgaaaagtgcttgtgtgctggctcccataccaaaggtaagcatggtggttgtgatgacacataatttagcagaagggttcaaggcatctgtgggaatgcaatagtccaataatatgtaccagaaagaaatatcgagtagtcccaagccgacaacgaccaaccccataacagctccgctacggaaagctacacgcagtcctttgttcaaggagtgttgggcggcattggcggtacgtgcagaagcgtatgtagccgttttcattcccaaaaagccggacaatccggagaagaaaccgccggtaagaaaagcaatgggcacccacggattttgtaagttgaagccgtatgccatgatagaaaacagaataactaatcccagaaataccagccctaccaccttgtattgttgtttcagataggacatggcgccctggcgcacataagaagcgattttctccatcgtcggagttccttcgctttcaagcatcatttgtttgtagaaataccatgcaagtaccaatgccaagagggaggcaatgggcacaatccagaatagatacgtttccatacgcagtattgatttaaaagttggttttgcccaaagatagcaaaaaataaatgatattcaataggataggtcgtatttttatcaattaatatttgcggtgcttttctaattaagtttaggggggaataaatatctgtaacttggaacacatgtacctgttcctgtgtttcgtcaaaacacgatgaaaggtaaacaagacgttaaaaaacagtttcaccacagatcaaatctgtataatctgtggtgaatttaaaactcaggctttgtatttaccatacagcttatctatcagatcagcgcgtcctattttgcgcaattcattgatgatagcacgtcgttcttcgggtttataccagaaaaagaacatccgttgagccagtttttcttttggtgttttagcggaaaataccggttgcaacgtatatggatgataacctgtgtaccaggtttcagtggctacagtcatcggagtaggagtaaagtcctgtacttgttccagatggaaatccaatttcttggtgatcactgccagttctgccatatcttcttccgtacatccgggatggctgcttataaaataaggtataatctgctgccgcatattcaactccttatttattttgtcgaaagtctttttgaagtcataaaattgtgaaaacgaaggtttcctcatgatttgcagcacttggtcgctggtatgttccggagccactttcaagcgcccactgacatgatgggctatcagttcgcgggtatattcagctgtacttcggtttactgccggatctttgctttgatattgtaacaggtcatagcgtacaccgcttccgataaagcttttcttgataccgggaagtgcgtctaccgaatgataaatatccaataaggggcgatggtccgtgttcaaattgggacatactttgggatggatacatgacggccgtttgcatcgccggcaaattttctcatctttaccacgcatggcatacatgttggcgctaggtcctcccaagtcactcagatagcctttgaaatcaggcatttcagttatggctcgcacttctcttaagatactctctttacttcggcttacaataaatttcccttgatgggcggaaatggtacaaaaggcgcatccgccaaaacaaccacggtgcagattgactgagaatttaatcatgtcgaatgcgggaatgcgttttcctttatatttaggatgaggcatacgcgtatagggcaaatcaaaagaatgatccagttcgccttggctcattggaggataaggcggattgactactactgtttcattgcctgtatcttgcaagatgcgggaggcttcgtacttgttgctttcctcttcaatgaagcggaagttctcggcttgtttctttttatctttcaggcatgcttcatgagaatgtaggatgatatctggcttttcctgagtgccatcaggcggacacatgggttcgcccttacgggttatgtaggctgtttgcaaaatatcatgtggaaccggaagactttctacaggagcagattcatgaggctgtccgacggcgtccgccaatgtcttcattctcttgcaaagttccgtaatcggtttctctcccattccatagatcaataaatcggctccggaatctatcagaattgatttacgcaggcagtcctgccagtagtcataatgggtgacacggcgcaaagatgcctctatacctcccagaatgacaggtacgtcgggatagattttctttaaaatctgtgtataaacgatgctgggatattcgggacgcatgtcgtggcggccgtcgggagtataagcatcctcgctgcgcaaacgcttgttggcagtgtatttgtttaccatgctgtccatacatccggcggacacaccgaaaaagaggcgtggacgtcccagcttcttaaaatcgcgcaggtcatcacgccagttgggttgaggcacaatggccactttcaaaccttgcgcctctaataatcgtccaattactgccggaccaaatgaaggatgatctacgtaggcgtcaccgctgaacaagattacgtccagttcattccatccgcgcatctctacttctttcttggttgtcggcaaccagtctgtaagtttgtattctttcaatgataaatactgttttttttgttttgctacagagaacacagagattgtttattatatctcttcttcatctttatttttctctttctcccattggatataaagcagaatgagttgatgaagtccgaaagctttcatgttattatgataaattacatcgatacaaaggtcgagcagctctttattgtttccttcctcgctggttatcagtgaacggatattcaacttcagtttgtccagtaccgactcgtccacgataccgttgctgtctatcagatgctggaataaagcatatttctcaatagtttgcaggttctcttctgagatttccatgctgcgtgtgccggaggcattagtctgtatagtgtacatagtcgttttattttaatggtttatacggacaaagttaggcgtttttatgaaataacctcttatttgcccttttattttcgtttaaaaatatcacttgctgccaaagaagcccaggatggcactcattacccgtgctctttccttcactccctgaatgctttcaaaggggaaacccaggacaaaagtccgatatttgcctttataggcgataccggcactgtaactgcccggattatatacaaaagcggagtaagcaggggctatcggggtcagacagtcgggagcgggtacggcgtatgtttgctcgttgatagtgcggggaatactgaaacgggtgttggctccatatatttctcccgaagtggaatttatcatgctgcctccgaaactatattttaatatgttttcggtgaagttcagtgctgtgggactgttcatgttgcttcctatatacgagccgctgagcatcaggttgccgcctccttgacaataggttgtgagcaactgttgcaatgtgtgggagaaaggacgcctgtcggctccgaatatcaggtctgtaatggggtaatctgccagccggacaaaaccattttcaacggcttcatcactacacgatacaaaagagtatcctccggctgcctggatggcttttccatgaatgaacggataatcgaaagtatttccggctatcaacattccttccagttcgctgccgctatatcccagcccgtctttagtttcccgtcctatgcggctgcggtcgaagctttgttgcgttccgcagaaggcgggtgtatttatataaggtattcccggatccgtattcaagtcaaagccttgcaagaaaggagattctacggtagcaggtctgcttaaacggtcgaatccgttgactatcaagattgttcctttacttttctttgcctgataggctgacaggatttcggaaggaaaactttctccgcccttgttgactgcggttactttgaaactatataccagtcccggttcggcttcgaaggtatattcagtaccgcgtactaacgttccattgtcaaatccaccatgtcccagacgggtatagactatgtattgttgagctttggcagtcggttccaacgggtcgtctaccgcttgccaagttagttggaaggtgtttttcctacttccggagtgaatggcaaagttatttaccggtaaaggttggactacgtaatccgtcccatgcatggtactcaggtattttagtatggatttgtaaacagaacgtcctacggtaaacttgaaacgcggatcgtgtcctagtttcaaatcggcgaagttctggtgggagaggagttccagaatcatcgagggaacggcaggcagacgggtctcgctgtaattgcggttccacaggctgcggcgttgccaccggataccgaattgggcggagatatcctgttgcagaccggtcagtaccatgtccgccaagtcgcgggaagcataacgggagataccggcgttcagttcaccattattataatcggtggtatagatacccagcgtgcctattaaatcatcttctttggaaaaacctgcatcgctgtgcactcccaaggtcatttcaaaaggaacgcccaatcccttctcctttggattgtacacagaatttccgctgagatagtttattatccggctgcgggcgtttatatcatcggtatagtcattcttaccttcgctgggactgtaaaccgaataaggaaaacccgaccattgtgcggcatagcgtgccccttccagataacggggcaggccgctggtttttccaccgcgcgatatgtttcccattcctccgccaaaacggacggcatcggcgcataccactcctttttgtctgctctcattacttagtaccaccataccgtaatcgttggttcctttgtcgaattcaaaagtgcccagataaacccaggttcctccccctatttgttggttgaccagaaattcggtgacaccccctttatggaaaaccagatatttagcgtcactcacacttccgggtaaagtctgataagtcacatagacggcatattttcctgtttcgggaatatggggaatccattgtgcaaaggctttttccggttttttctcggtggaggcaaagcgggctgtaccttcttcaaaaggattttgtccgtcccggtaaaccaatcgtttttgagcgaatgccggggtgggggcggttttccatttacctttccggctttttatctcctgatagatgcaaccttggggatgggtatcattatccacaatcacctcattgcgttgccagtcacgttcacgaggggtataaactatggctcccgcattttccagcatgggtataatataaggtatgacgaatgattgggtgaacaagtcttctgtggtacagaacaggcggggacgttgccattcccaacatcccttgtcctttttataatattttccgtggctttgccaaagggcgatgtgtctgccttccagtcctttgccggcagtaaaggggcgggaaatattttttacccatggatcacctttataatctgtccgttgccataagcggcttttgtcctgtttctttctcagatagttgggaatcaggtcttcgattgatttgccatcggcatagatggttatatcgtaataatttacaggaccgggtaggctttgtctaagtaaccggtagatagcttctgtcttttcgggggtaaacggttggtagccgaagctggggctggcatatacattcagtctttttttgtcatgatttacttcataacggtctaatttacacttacctatgttggcataagatgtttcgtaccgggtgaaaaaatcttttagacgttgttccacattaccatctaacccttgtgccaaagtgtgtgatattcctgccattaccagcaggaaggacaaaaatatctttttcatgttgttttcttctttatttatggttgcgaagttaggaatttttgttagttttgtcattctaactaatctataatgaacctaaatgaaacgaattatctttaatttctgcttcgtatggctggctgtttccgcttttgccggaagtaaggtagtcgaaatgcgaaattatggtctggtaccggacacacacgagaatctttcacccaaattgcagaaggcgttacaagacatcaagtctcaagttgctttgggtgataaggtcactctgctttttgaatccggacgttacgatttccatcctgaaggggcggctgtccgtgagtattatatttccaatcatgatcaggacaatccgaaaacggtaggtttccctttggaggattggaaggggctgacggtggacggacagggcgccgattttatctttcatggacgtatgcttccactttctctgcttcgttcagagaattgtactttgcgtaatttcagcatagattttgagactcctcatattgctcatgtcaagatattggaaagcggagaggagggaattacttttgaacctgccgcatgggtgaaatgccgtatcaatgagaaaggttttttcgaagcatacggtgaaggctggtccagtgctccccagggagggattgcttttgaagaaaagacaaagcgtctggtataccgcaccagtgacttatggtgtcctatggaaggattgaaggaaatctctccacgtgtctaccatgctcctcaatggaaagacgcccggttgaaaccggggacagtggtggctcttcgtacttattatcgtcctgctccgggtatattcttgtccaatgataaagacacccgtttgcagaatgtgaaagtgcattatgccgaaggtatgggactgctggcccagttatgtgaaaatatcacgttggatgaattcagcgtttgtcttcgtggcgataaggatccgcgttactttaccacgcaggcggatgctacccatttctccagttgccgggggaagattgattctcgcaacgggttgtatgaaggaatgatggatgatgcgattaatgtacatggtacttatttgaaaatcaagcaacgccttgatgaccatacggtgattgcccgatacatgcatccgcaagcatacggattcgaatggggcgtgaatggcgatgaagtacaatttgtacgttccgccaccatggaactgaccggtggaaagaaccgggtgaaggaaatcctgcccaatgacaaagatacggtgaaaggtgcaaaagaatatcgtatcacttttgccgagcctttggatgcggagattacggataaagaaggtttcggcattgaaaacctgtcctggtgtccggaagtttattttgcggataatgtcattcgtaataatcgagcacgcggtacgctgttcagcactcccctgaaaacggtggtagagcgtaacctgtttgatcatacatcaggaacagccatattgctgtgcggtgattgtaacggctggtttgaaacgggagcttgccggaatgtgctgattcgtaacaatcgttttatcaacgcattgactaatatgttccagtttacggaagctgttatctctatttatccggagattcccgatttggagcatcagaaaaaatatttccatggtggaaaaggagaaaaaggagtagtgattgaagataactattttgaaacctttgaccgccctgtactttttgcaaaatccattgacggattgatctttaaaaacaatgtgatccgccagaatacggattatccggcttttcatcataacaaatcccgtttccgcttgcttcacacccggaatgtgaagatagagaagaataattttgaggatggggatgagagtatagcaagagaatagatacaaataacactgattatgcgggtgaaaatacaatccgcataatcagtgttttcatatctgaagaactacaacggaagggttattctatttttccaatgctgaagttttcaggatatttgcctttgaaattcttataatacaatttgatttcacgcatatccttgtccaaatcaccgctgggatgtattaccttttcggctgtgatgcatttcttctcgtagtcgatagctaccagaataataggcagaccagccccttgcgcaatatagtaaaaccctttcttccaattgggattggctttgcgtgttccttccggagtgatagccagatggaatttttgactcgatttggcaatcttaatcatctggtccaccaatgaagtcttgcggctacggtctacgggaatccctcccatccagcggaaaatagggcctagaggccagaagaaccagtcttttttcatcataaaaccggtttcgcgacctatagctcccataaacagtttgcctatgaacaaatcccaattggtggtatgcggtgcggcacagataatatatttgtcataatcgggaacggatactttagtcttccatcccaatagtttgtagtagataaaaccacaaatagcttttttcattccttaaatcttatgcttttgtagctttagccagttcgtctgcaaccacttttatttctttgttcaaatcctcattcagtttcttgtagaaaccttttacgttacccggttcagtgtgactgatgcgtataatcagtttgatcacattgtgtacagagttgcaaactacttcacggttaacaccttccatcaaactgactaaaaacaaatcacttgctatattggttatttttttctttaaatttcttctacttgccataaatgtaatgttttaagttaatacataattctaaattcgcggtaaaggtaatatttttatttgtatacgttttcatatttgcgaaaaaagaacgaaatttgcacgtgaattataaatgaaattatacacctttaaatagaataatagaatatgactaaaagtgcattacaaattgccagagctgcttatcagcccaaacttcctaaagcgttgaaaggcgctgtaaaagtaaaggaaggtgaacctacacagtcagttgctgaccaggaagctatcaaagccttgttccctaacacttacggcatgccgttgattcagttcgttgaaggcgaagctgtcaatatgcctgccatcaacgtaggtgtcatcttgtctggtggacaggctcccggcggacacaatgttatttccggtttgttcgacggtatcaaagcattgaacaaggacagcaaactgtatggtttcattctgggccccggtggtttggtagaccataattatatggaactgacttccgatattatcgacgaataccgcaataccggtggtttcgatatcatcggttcgggacgtaccaaactggaaaaggtagaacagtttgataaaggtctggaaatcatcaaggaattgggcatcaaggcattggtaattatcggtggtgatgactcaaacacaaacgcttgtgtattggcagaatactatgctgcgaagaactgcggtgttcaggttatcggttgtccgaagactatcgacggtgacttgaagaacgagatgattgaaacttctttcggttttgatacggcttgtaagacttactctgaagtaatcggtaacattcagcgtgactgtaactctgcccgcaaatactggcactttatcaagctgatgggacgttcggcttctcatatcgctttggaatgtgctttgcaggttcaacctaacgtatgtatcgtttcagaagaagtggaagagaagaacatgtcattggatgatgtggttacttacattgctcaggtggtggctaaccgtgccgcacaaggcaataacttcggtacagtgttgatacctgaaggtttgatcgaattcatccccgcaatgaagagattgatcgctgaattgaacgacttcctggctgctaacgcatcagagttcgcattgatcaagaaatctcaccaacgtgaatatatcatctccaagctttctaaggaaaactcggaaatctatgcttctctgcccgaaggcgttgcacgtcagcttactttggatcgtgacccgcacggaaacgtacaggtatcactgattgaaacagaaaagctgttgtctgatatggtagccgttaaattggctcagtggaaagaagaaggcaagtatgtaggtaaatttgccgctcagcatcacttcttcggttacgaaggacgttgcgctgctccgtcaaacttcgatgctgactattgctactcgttgggttacaccgcttctatgttgattgccaacggcaagaccggttatatgtcttctgtacgtaacactactgctcctgccgaagaatggattgcaggtggtgtgcctatcacaatgatgatgaacatggaacgtcgtcacggtgaaatgaaaccggttatccagaaagcgttggtaaaattggacggtgctcctttcaaggcgttcgccgcacagcgtgaacgttgggctattgaaacagactatgtatatccgggtcctatccagtacttcggtcctacagaagtttgtgaccaggcaaccaagacattgcagttggaacaaggaaaataattttttcttatttctataaagcataaaggaaacccatcggggctgattgtaaaaccattctcccgatgggttttattgcatagtatgtgggaataggtaaggtaaaaacagctaaataggataaaatggtaagagcgaaaagcacacgtcctgcccctgttaaaaaaaaggcagtcgcgaaacctgtccgccggaccacacagcggaaggcgaaaaagaaaccgcaaagagagatgccgtcatggcttcggtatgtcattgcggggattattgcttttttattccttgccgctttcttttatttctttatccgtccttactcttaccgttggaagccttgctatggctttaaagcatacggtgtatgtatgccctcaggttttcatgtgcatggcattgatgtttcccattatcaaggaaacatagactggaaaatgctgacccagacccgacagggaaaatttcctattcattttgtctttatgaaagcttcggaaggaggcgattatggggacaaggcttttagctccaattttgattcggcgaaaacacatgggtttatccgtggggcttatcatttttacaatccgaagacagatcctgtccgtcaggccgatttttttatcaattccgtcaagctggattcaggtgatcttcctcctgtgctcgatattgagaagaggggaaaggatgagaatcagctccgtcgtgaccttaaactgtggcttgacaaaatagaacagcactacaaagtgaagcctattctttatacttcttataagtttaaaacgcgttatctgaatgattcggtcttcaattcttatccttactggatagctcattattatgtagactcggtggaatacaggggggagtggaaattctggcagcatacggatgtgggtacgttgccgggtattcgtgagaaagtggatttgaatattttcaacggttcgttggaagaattgcaattaatgaccataaagaaataagggaactgtgcctgaggttccgaaaactttgcttatatttgctttatgaacttactgctcaatattatttggctgatttgcggcggatttctgatctgcgtggaatatattgtttccagcctgttgctgatgattactatcgtcggcattcctttcggtttccagactttgaagttgtctatgctggctctttgtccttttgggcgggaaatacgcagttgtcccggtgatggtggatgtctcagtgtgttgatgaatatcatctggatacttgtaggtggaatctggatcagcctctctcatctggcattcggggtgttgctttgcatcactgtcatcggcattccattcggactgcaacatttcaagctggcgggtttggcacttactcctttcggaaaggagattgtataataaatataataccgatatgatcgtttggtcactttggataaaatgcagcgtcctacgtgcgtttgtcaccgcttgattccggttctaattttcagggaagaagaacaaaaggacaaaagagagaaaatccgttcttttgtcctcgaataaatcaatgcatatcctgcgtggttggtggcaattccgtctttatcgcgtctttgccatacttgaaaatggtattatttcatgatgaatttcacagctgcccagttgttcttttcccgatgatgtacgaactccattcccagactctccgctttttcgcggataaaaggaatatcctgtatatagaatccactcataaatatttccgaacccggatgcatacaggcggcataatggggaaggtctgccagaagaatattccggttaatgttggcaataatcacatcaaacgctttgcgccctttcagcagattggcgtcacccagttccactgtaatgttatggatatggttcagtgcaatgttgtcttttgaattgttgacgcaccagtcgtcaatgtcgatggctgtcacaggattggctcctcgcatggaggcaaggatggcaagaatagaagtgccgcatcccatatccaggactgattttcctttcaggtcggcttctaacagctcgctgattatagagctggtcgtttcatgatgccctgtgccgaaagccatttgcgggttaatcagaatttcatactcagttttcggagtgtctttgtggaacgtgctgtgaatgcagcaacggtcacctatgacgatgggttgaaagaagtttttctcccattcttcattccagtttttgtcttcggcttcctttatggtgtattctatccgggtgtcaggtaaagggaagttcgcaaccatttctttcagtgcttcctcgtcaaagagagtttgctggatataggcctgtattcccccttcacattctacaaaactttcaaatcctatttctccggccaatgcggacactacatcattcactgtctcattacagggatgtgttgtaaaggttacttctaaatatttcatatcttttcgtttattctatcactttacggagcaatgcctccatctcatttttgaagatgcccgcttcatgcactttcaccccgtccacatagaacgtgggaacgtaataatagtcgtattggtcggctatatcaggatgttgggtttcttctatcatttctatttctataggttggaattcaggatattctgctttcagttcttcaatatagcgcagtgcttttttgcagaacgggcatctttcctgataaaataatttcactggtttcatacgattgttggtttaaggatgatgacaaagataatttcttttcattactttcacaaacaaaccttccgtctttttgtttcagacttgtgctctcattgcaatgttagatgcaattatgccctcatgccctcatttgtgaggtaatttgtttataatgaacaggttatttgtgatggtagcatagaagagtatgagggcattgccctcatactcttctatggtaaaataaattatttcaactttgttacatgatatagggtacctctggtactggtctttttaggaatgttcagtttgcggagaatacgtccaaaccaatttattttattgatagacagtttgtcgcgtgtgttctcttgaagataattaaaaatatccatggcagtcatccattctccctccttttcgttggttgcagaagaaaagttacaatggaataaatgctccaaaggtgatatttgttcaaattcgctgttgctttgtcgtaaaacggcctcatcttcgtcattcagccaataacgttcgttcttataaagtaaatgcatggcttgcgcatagagttggcggtagtctatggtgacattggtatcaatgggatcggtcacttcgatacagataaagcgacggcttcccgtggggtcggtgagcaaatccttctgattgctggtgccgatgaatgaggcatagcggcgtaattcgcgcacgctggttccgtaaggcttgcgcagattggctgtcggtttttgtagcagatgtttcagaaagccttgttgatttacggtaatctggtcgaattcgtccaggttgataaggaaaaatcgtcccaaggcacgctccgcttcctgtttgctgctgaagtccaggctgtcggcatagccgaaacggagttcgggtggcagcaagatacggcaataagtggatttccggaatccttgcgaacctacaagtaaaggtgaagtgctgtttccatgctggcggtccatccccctccaatgcgccaccatgcctagaaaccaacggtaaaagagttcttcccaatgcggattgccgcaaggaacgagccgggcaagtgcgcggatgcggtcagtaccgtcccagcggggaaggtcacacaagtattcttctacaggattgtaaagcggaacgaaatcggaggtgagaaagcggtctatatctgtagatactaattgaaaagtgcgctgtattctaattgaaaagagctccatccataacttgttacaaaattactataagtttaaaatattcatttatcttgtctcattttttgtgtttccttaagcctataagacagtccggtcatattaaccagataagctttatgtgtaagcctgtcaaccattgccgccacaagcaccttgtcctttatgatttcattccatctgttaaaagccaaattagtagtaatgattgtagccttttttccggctcttaacgacaggtggttaaaaagcagttctcctccttccttgtcacaactgacatatccgaactcatcacagatgaccagatcgtatttttcaaaccttaattgtagcgtcctcagtgtctttgctgatttagcctcccttatctgggtaagcaggaccggcactgaagtaaacaatacggtaaagtcctgttggcaggcctttattcctaaagccgtagcaatatgcgtctttcccgttcccggatttccatacaggaccaggtttcttccctgtctgatgaagtccagtgtctccaattcaggtaatattacctgtgcctctttgggcatgtcttccataacaagctcatgcagatacttcatttgtggaaatcccgcagatcttatccttgatcttcttctacactcccttctcctggcgctttcctttccaagcaattccgtcaagaactgcagatggttccagttttcttcagctgccaatgaaagggtgcattccagttcctctttaaaggccagaagcttcagttctgcagcatagtcataaatggtttctttttctgatttcatatattataaacttaaatggttggtattatatcatgcacttcattgtatcctgtcatgagcgccgtgatgccttcaagcatatccacagcttctctttctatattctcctgttgtgccgggagaacaggcggttccatggtttcttctgtctctccctgtacgctaccatgcagcatggcctttacctggtccggagatatctttctgacaccacgtccggtcagctccttgcatgccgtgacaatgtccgttccggaaaatccattttttcgggcatagtccagcaacagaacaaacgtcctgttgtcctccttgaaatggatgtcatacagccttctcagttcttccggtgctctttgccaaaccacagagtggggcaatgcccccggtttacgggaaagtgtacgcaaatagtgctccagcttgatgcaccagtctccaccgcaataactgcgttgatgagaggccactttctccttcccgtgcaggatgacgattttttcactataaaccttgacatgtactttttctcccacaagagaatcaggtacggaataatgaacatttttcatgctgatagttgaccatttatccacaatgtactcatagacctcaaaacagcccagattaccgggaaaaggcttcagcgatgacaggtcagcttccagacgtgatgttttctccgctgttgaaagactgccttgctcgttgttgacctgcatacatacccggtttaaatgctcctgggcagaatgtatatcaccaaaatggtctgtcaggcagaaagctttccttctgacatattccacgctgcgctccacatgtcctttctcccatccggcccgtacattacagaaacggtactcaaaacaatagaaaccggacatcttcatcaaagcttctgtaggtttcttatcaccaccgacaaagctcttgacggctacacgcatattgtcatagaccatcatggcggggacaccatgtatatccctgaaaaagttacggtgggattccatgaaggcaagcgtattctgatgcctgaaaagataggcgtatctgccattgctatgcccgaaagtgaatacggccagataaaacttggttttgacgccgtcaataaaaagaagaacttcaccccagtcaaactcggcaatgcatccaggctcatagaacaaccggataaaggcttcgctctttttcttctctttgtatgactctatattttttatataactgcatactgtggcgtaactgatggtgtatccttgagataacagaaactggtggatatcctttttcaacatgcgctgtttgcgaagtccggtagctatcttaacggcattcttcttcaggcaaaatcctatcttatccttaatctcttgtgtgagccggcgaggacggcgtctggaactgtcatacctgggctggatggtaagcaaatcactcaaagcctcttctggattgtccgtgcggatggctgattcgtactttgaaagaatattgtcaacggtatgacggctgacatgaagttcacgagagatacgccgtttgctataaccgcatactctatacatgtgtattattgattgtctttctaccatagtcttcattttacctttgcatttggattatacaaaggtcattatacttatcctatggtggcgcaattttcaactggaatattggcgcacttttcaattagtatctacagtctatatcccggtcccacacttgcagcccttcttttaaggcgcagagggcgatactgttgcgggtacgtttatctaaaggcttgaaatagaaatgaacagagtcccgttgacggtattccacctcgtccagcacggtgttgaagcggaattcataccgtcttttcaagaattcctccagccggaaggtggcttcctgctctttactgaaaccgctttttttaccgaaacctttcatttcccggtatccgttgccaaaagctgtacggatggtttctgtgtccgttgcgtgaaaatagtgcatcagcgtgcgctgtacggcttcctcttcggggatgcctgttttgaagcattgttctaccagatggggcagtaaaggttccagcccgtcatcacgtttccagttttccatctcggccaatgctcttttccgtgccgactggtacatctgggcaaaaatctgcatactttcgcagccgggtgtcattcgttccggtgcgctttcgctgttttgtttccgttgccggaaagtttcctcatcgggcagggcaagcggttgctctatgcagaaaggaacggacgaagggttatagtaaggttgttcatccacggtcatgcgacagctttgcatcaggtccggttccttcagtgtgatgccgaaaggaagcatgggctggtagcatgtcaccgccagccgataggcgtgggcatgaaacaggaggacttcttgtgtggcagtgggcaagctgccgtcagtgcgtgcgaagcgtatccatatctttacgctccgtccgcttgaaccgcagaaagcggcaaaggtttgtggcagttgctctacttggcgtttcacatattccacctcatacaggtcggcgagccggttcacttccagctgcaccagtccgttgtaatgtttcatacgtttctcacccttttgtttgcgggtatattctacggcaggatagacacgcggcagtttgtcgatgtggacgtagcgggcggacgatcctgccagccggggtagtatttcacgcagttccgatatatgccctgctttgttctctgtctttactttctcgaagaatgcgtccgtatcgcatagtgacaaggcttctgtcccctgttcttcatctttcctgatgagtgtaattttcatatttgtctttcgtttgaatgtttttttggttttatgtacctcccatggaaaagatgatgttctgtcgtgtggagaagactgcgtattgcgagtgtctatgtgtgcatatttttagtaaagataaggtttctttccggattctgcaaatgctttccggattaaatgccgtctttttctttttcctttcttttctgtgtttttattcttagtctcagtgcatattcccctgtctcttatttgttttctaccttttcttttcttatttttgtatgtttgtaattagttatctacccttgtgattaagtctgatcataaaggtgattaaaattaatcacaaaggtagttaagcttaatcacatccgtgattaatagatattgaactttcatcaataaaaaaagaacagtatggcaatactatttgattggtacgagaatcccaaaacctctgagcaacaaggggaagagaatatgttgcatccgcgtctccggctgaatgggaaagtaagcacggcccagctccgtgcccgtatacagaaatattgtacattgacggaaacggatgtaatagccgtgctcgatgcgctgtcacacgccatgggcgaggaattggcggaaggcaggcaggtgcatctggacggcatcggctttttccgtcccaatctggtgagcaccgagccggtaaccgaaaagacgaaacgtaaaaatacaaaggtaaggcttaaggggattgtttaccgccccgaccgattattgatggatgaggtggggaaggtaaaggtgcagcgtacccggttctcgtttcattcaagtaaactgaccgatgaggaaattgacgcattgctgacggagttcttcacaactcatgattttgtgcagcggaaaagtttccagcttctttgcagtatgacacaaagtacggccagccgccatttacaccgcttgtgcgaggaaggaaagctgaaaaatgtgggacttcccaaacaaccggtttataagccgataaatgggtattatgttgtgaatgaatgatttaagtgagatgtgcaagaaaataggagtgagggcatgagggcaatgctctcactttttaacatgccctcactgtgtgtagtggtttaataatgagtaggttatgacttttagtgagggcatgagggcataagtgggtgcaacttaatataaaaagttgttttaccaccagatttgtttaccatcaacgtatgtgaacggacgttcttctgttttccgtgtgtgtgcagaaatagataaaatagttgaagtccgttactaaaatagggaaatccctaccaactaatagggattttctttgttatgaactgaaacctctggctatctttgcactagaaaaagtagatagaataacaaataaaacaggtatgagtatgaaaaagattgtattagcttcgcttatgatggtgtgcttgccttattgggcaatgtcacaaagcgttgatgacgacctttatttcatccctaagaaaaaagctgaaaagaaagaggaggttaagcaagaggtgaaagtggtggttccgcagaagcagaacacgactaccgtttacgcagcccccggttctacagtggtagtgaaggatgtgaaaggaaaagtgcgcgatgtggatgagtataatcgtcgttatacttcacgagataataacttctcgatggagaatgataccttgtatattgaggagaaacctttgaatgagagaggggaatgggttaatggttttgagggctctcaagacgattatgaatacgcgatgcgtatcgtccgtttccgcaatccccgttacgccattccggtaagcagtccgctctattgggatgtggtttacggtttgccttcatgggattggaatgtatatgatgacggattgtatgcatacgtttttcccacttacacgaaccgcttgtggtgggattggcgttggaattatccatatggcgccagctggggattcagttggggatggagttcgccgtggtactacaatagctggtactatcccggttattggggtggcggctactggggtggctattggggctaccatcatcaccaccaccatcattattatccgcattattccggtcacggttggggcggcggctactggggaggcggtcatggatggtatggctcaagcagacgtaatccgggaatacatgccggaagatacaccaacagctatggctcttcacgcccaagccggaataattatgtgaatagttatgataggaatagtcgtaattcgtatgtaggaaattccagacaaaatgtccgtaatagtgctaatagctatcgtaccgcaacacgtaacggatcttcatcaggaagagtggtttcgggatctgacggtgtaaattcggttcgtcctaatagaagcgctatcagaacccgtacaggagcaactctttcaccaagtcaggctgcaggagtccgtccgggtaattcgtattcacgtccgacagaaggaaggggttcttcctataccagaccaagcagtacccggagaagtgtgggaaatgcagcaggatctgcttatcagagaacaggggctgcaagccgtggcgcttatcgtaacaatagtggcgtttcgaactctcgcagcagttcatattcccgtagcagcagtccttcccgtaatagttcgtctaactcttaccgtagtagtggaacttcttcttcccgtagtagtttttctagtggcggtggggcttcccgtagttccggaggcggtgtttcccgttcaagtggcggtggcagatcgcgtaccagataagtagcagattaaaccagactgttgtatttaatagaattgatgtatgaaaaataaagtaatagtaaccgcttgtacgttgctggcaatggcaacggcaagcgcacaaaatgcttatgatgcggaaaagttgctggggaatgacttgaatggaacagcacgatttgttggtatgggtggtgccatgggagctttgggaggtgatatatctgtcatgagttccaaccctgcgggtatcggcatttttcgtagtaatgatgtgtccgtttcttttggttttaataatacttcgacaaagagtaactttagtggcgtgtcaatgaatgaagacaaaacgcgcgcttcatttgaccagattggatttgtttatagcaataagataggcaacaatacttctttgcgttttgtgaatttcggattcaattaccataaaagtaaaaacttcaaccgccttttctctatgggaggggcgttggataatatgtcacaaagcttccagctggctcaggaaatggaacgatatggattgacggaaagcgagtttaatgacatactggatgcgaagaatccttataccaaatattggaaccagttacctgttttaggagtaatgggggtgagaaccggtgtggttgactggtttaatgatcctgaaaaaaacattcatgctccatgggggtggaatggttttaacaataacttctttagtaaggaaactggaggtatcagtcaatatgattttaatgtttcattcaatattgaagacagggtctatttaggagctaccttgggggtctatgatgtgaattatgaccgttatacttcttatacggaaaatttgaatgatgataagggtgcggataatggggggtatacattggataattattatagactggaaggaactggtatggatttgaagttgggggttattgtacgtcctatagaaagttctcctttccgtttgggatttgccgttcacacgcctacatggtatgatttaagagaaagctataatgccactttatcttctgatattttagcttatgaaaaaccctatatccagacattgagtgattttctggtaactccggaatatgattatttgacctatgattataatcttactactccgtggaaatttaatgtcagcgcgggtactacttttgcgggtgcggtggcagtaggtgcggaatatgaatatcaggattattcttccagtaagctgaaggatgtggatggttatgaattgggagatcagcctagcgttgagaattatctgaaaggtgtccatactttccgtataggaatggaaacgcggatcatacctgagtttagcatccgtgcagggtataattattcttcggctgcattttcaaaagatgcttatagtgccttgtctttatatagcacgcgtactgattttaataatacggagtctaagaatacctttacgtttggtcttggataccgtggcagtgtaatttatgcggatttggcatataaatatgatatgtataaatcaaacttttatgcttttgacgatatagatcttccggcaactaaagtggacaatgaacggcatcagctcttgctgacagtcggcgcccgcttctaagaatttattgtgagtctaatataattaacctgtgatataccggaagaactttataggcttccggtatatttttttatttatcgcggaattctttccttttccagaagttgaatcctgcatatacacgaacggttccgaatgtattagtgagagagaaattccttttccgataatcgtatgtatgcatcaccagtgaagcacctacaaagtacttgttggtattatagaccacggcggcacgtgttatcaggtcaaaattgatatcctttatccaatgattgtcggtgttaggcgtatcgtctatttttgattttttataggcaatggccggtaagagtgaaagattggaaacccagttttttgcaaatacccagttatagccataacccacgttgatgctgtaatcagaatatttcactttcttgaaaagcagggcatcatgcagttgggctctcacttcaccgggaagcttttcgtaatcaaaagatatgttgtgctgggaataagaaaagcccgccatcagggaacccgcgcttttacgctggttggtggactggctataggctgccggataagagaattttttataattgaaaatccaataggcgttcagtcctttgattttactttgcaatccgttgaaattcagatttttaatgggagttttcaggtcaaatccgctggaagaacgtatcttgaaatcgcttcctgtctttctgtaatataaatccacaccaaatttggaactataaagattcagtgccatttcggttttcttggccttgttcttgtgtccgccgaaaatatcttttacatcgaaagaatatcctagaaatatccagcgccatccgaaatagacccccagcttgaaactggcattgggggagaatcccaaactttgttcgccgttgtttcctttactgcctaaccgatagtattcgtaccaactgctggattccagcatgaaagccagattgtagaggttaggcgagatataggtggtatcgaccgcgttgaattcttttcccactttcctgatttttcttccggtatgacggacagttgtcgctattccatcggtcaatgtaatgagaacacccttgttgtcctgtactgtcgagtccttctgttccgcttgtgcatatacaccgagggcggaaaggaaagacagacaaaacaggcataattgacggatgtccataggcagaaatcagagtttgtcaagtatacggtccattacccagttggtgggtgtcgcactgatgccgtcgcaggtacagacggcttttccctgcaagtgttctactacggcttttatgagcggaagttgtacatgagggggattttcgggaagaaactcctcgcggcctctttcagtatgcagggcgatgggatcgtaagtgaaaacagagaaacagatcattcccttgtctccgatgatttctatacggtcttccttggccgattcatgggcaacgaaacaccatgatcctgatcccggcagaccggaatcaaatttgaagcaggcacttatcgtatcttctgccggatataacccgccacggttgctcttgtatccttgggcttcgagaatgcagccgaacatatcttgtagcaaatccagctggtgaggagccagatcatagaaataaccgccgccggcaatatcaggttgtacacgccagggaaggttggtactgttgtaatccaaagcgcggggaggctgggcgaaacgtatctgtatgttgatgacattgcctatttctccgtcctctaccatctggcgtactttttggaaataaggaagatagcgtctgtaataagctacgaaacaaggaattcctgtttcctgtgatatgcggttgatgcgtgcacagtcttcatagctggccgccataggtttctcgatgtatacgggctttcctgccttcatggacataatggcaaaagtggcatgagaagaggggggagtggctatataaatagcattgacatcttcatctcctattaactgctgcggatcggagtaccagcggggaatgttgtgtcttttggcgtatgattgagctttttctttgtcacggctcattacggccactacctctgaaccttcgatcagggcaaaggctggtccgcttttcttctcggtcacttctccgcaaccgatgaagccccattttactttgtctaatttaaccatggtaataacttttttgtcattccgcttaaaataataacaatttatattgcaaagataggactattttgcaatttcagccggataaaaatcagttattgtaatatttcttgcgcaacagtttgaatgcaggagtcttgacgtagtcatttaaccaggaattcaggctgtcaagcaatattggagaatgtttgcttactccccatgaatagaattgtgagaagctgatggctgtttctatatccaattgtggaaaatcattgatggaggcttgggcaatgctctcgtcgcatacggcatagtctatgtcaccatgtgctaccatggccagtaattgttcttgtccgtatttctccacttctttgatatagatggtatcgcctatttcgttacttaaattatgtatgcgcaggatggcaggtgagtttttgactagatgaagggtcttgcgggctagttccaactggctgtgaatgtacagactatcgttttctttttcgggtttacgctgtaccagtacttgtttgttcagtataatggggcgggtaaacaacagggagtctttgtattctgtggtaactaccgtgctgttggccaatatatcgtatgttcctttttgtacgccttccagtcttttggaaaagctcatttcaggagtgatttccggtttcagtcctttgctgtgtgcaaaagcatggagcagttcgtagtggaaaccggaaacggtgtcgccgtcggcataaaaactgatagaattgtactcggtaacggcacgcaggattcccgatgccgctatttctgcataatcgcggggcagactggtttcagcctccgttttctttttgaagaagatggaggatagggttactgcaaggatacccatcagaatgtatttcagatattttctcatatagaccgtcaatcaaagaaattccatgaaaggccgaactttatcattcgcggattgattgggtagtgaggcgccaggaagtaattggattttcccgaaccggcattgacgtgatacatcataataaagaagcgggtacgttttaaatgcaggttggcatagacgttgactatcggaaaagctcctatctcgattttgtcatcaggattctggttatagaattgtccgatgacgggggagtagtctggcgcgtaatatttactgaaataacgcacatctgctcccatttctatctggagtacttttttggcgagaccgaatttcatgtacaagttgccgtaagccgacaattccggtaagggcagaatgtcttgctcacttgatttttgataggctacttcaccgtcgagatgaaatattcctactttcaatttttgttgcaacattgctgtgaatatttgtatattgccggagtgctgtcttacggctgcattgttcttgaaaccggtgacatttccttcactgtcttttaccggtatgctggcattggccagataagtgtagttctttatattttccactccggcacgcagttgggttccccatctgttcagacttagttttccttccaggcgggttctcattattttggataaatcgttgttgtcccaccagtaatgtttggattggaaatgcctgaaatagaatacggggttctggttcttgatgaatgcatttacatccagtctcaccgtatctccgaataaacggagattcagatcccctctgccttctacgctgaattgtcctgcatcttcaccggctatggccaattctcctagaatattgtaatgtaatagttttccttgttttttggatagttcgccgccaatggagagtgaactttccttatagttgttgataatgcgctgtcccggtatgtttgtcgtgtcggtcaaggcgaagtttcggtattcataacttaaaaaggcggtaagtccggctttcgcccatttgttgaatccttcttgtaaagcaatgccaatggtatttttgatggatgtgcgcttcgtcttgtctatagagtcggtccccagatagttatgttcaaaatacttctgattctgtgcgtcatcgtatgagatgtatttgcgattgttcaagtccacttgtaatgtatgtatgaagcttgtgacaggaacaaatacctgcgttatttttacggagtccgtatccacactgtcctgtttttctttatagaaccctaagttgtaacgatgtgtcaggaaggcatggtagctggtgttgtgattccatatctgactcagtcgcgttgggatttcgttggcggaatattcttttttgccttctgccatatccagcgggttggtgatataccggtcgtccgtgatacctccgttttctgccatcttcaagttatcgttgttgaatatgaaatgcatgtcatatttgtctccccggtagctggagaacaggccaccgttgaagaaggctgtggactgatcttggtaaagcccccggccatacaggtaatctatgtagaatccaaaccccagtcttttgtttgcattgatggcaaaataggatttgaagcgttcttctccgtcacggctgcctcctcctttgtaatagctcaggttcgtgaatggagaaaatgtattggtgaatatgacatcttccggacgttgtacgcaaaagtcgtatgggtcggtgaaaaagtattggctgggatcccgacggtcaaaaaagatgcgtgagaggcggggggaacccaaatttcccaagtaattgtattgtccggtgtagccgcccatgtcatttgagttctggaaagcgtgctgcaaggtatctacggggatataagtgacattgccaaaacgactgtccactttccatgagtacagtccgatggggatagtgttggcatctactacggctgtcgtgtctatggggtttccgttacggtcatattggtttctgtccagtccgtttgccgaggaaccgaactgattgttcagggtattcattgtccgctgtgccatcaaggaagtatggaagcacaggaataataaaaaaataatagagaatattcttttcataacggcggcaaagatacaatataaaaataaaaggaagagcttttccgctatggaaagttcttccttttattattcgtttagagttattttaacttactgaggtttaataatctccattccgattcggatggcttcttcattcatcggtatcagatgatggtgacgttcgggcaatgttttgcgtaaagcttttattacactttcaatggatactacgggacgcagtttcagcaagcctcctaagacaatcatattgaaggtctttgccattcctttttcgttggcggcatccattgcgtcaatacgatagatttgtatgtccttacgtgtcggaggctcgatgattccgtatccgtcataaatgaggataccacccggtttgattttgccttcaaacttttccaatgagggttggttcagtatgatggctgtgtcatattggctgagaatgggtgaagagatgcgttcatcactgacaatcaccgttacgttagcggttcctccccgttgttcgggaccgtatgccggcatccaggttacttccttgtcttccatcagtccggaataggcaagtatcttacccatggatagcacaccctgaccgccgaatcctgctataatgatttcctgtttcatggtttctgtctttttattctttatctttcaaatcacccagcggatagaaggggaacatgtgttccaccatccagtcattggatgcttgcggagtcattttccaaccggaattacaagtcgatacaatttccaccaaattggatcctttgccattcattgagttttcgaatgccttgcggatagccttttttgctttgcggatggcaggaaccgtatgtacggcctggcgggtaacgtaggcggtgccttccaaagtggcggcaatttctgtcattttcagcggatagccatgaatggctacatcacgaccataggggcaggtggctgtcttcatgccaaccagcgtggtaggagccatttgcccaccggtcattccataaatggcgttgttgataaagatgatagtaatgttttcgccacgatttaaagcatggatggtttcggcagtgccgatacatgccaggtcaccatctccctggtaggtaaataccagacgtccgggccataaacgcttgatggcggtagctacggctggtgcgcgtccgtgggcggcttcttgccaatcgatgtctagatagttgtatgcaaaaacggcacatcctaccggtgacacaccgattgtcttatcttccatgcccatttcttcaataacttcggctattaacttgtgaaccacaccgtggctgcatccggggcagtaatgcatcggattgtcattcatcagtgtcggtttcttataaaccaggttttcgggttttatgatttcttcttttgtcatagtttctcctcctattgcttataacatgaaccgcataaagaattccatcagcttgagaaaaatagctgctgcacagacatagatgaatactttgaagtcacttgccatgaagtaagtgatgacagccgctagtgccagtgccatgaaaagtatgttcaatatgtttctgatcagatcgatattcatacggtcttattttattagtttctctttcagtgcagtgattacttcatccggatcgggaacaataccacccagacgtccgaagtgttctacaggcactttgcattctacggccagacggacatcttctaccatttgtccggcgttcaattctacagtgaggataccttttacctgtgcggcgcgtgctgcaatagctttcgacgggaacggccatagggtaataggacggagcaaaccaactttgatgccttcttcccgagccatttccattgctttttgggcaatgcgggcacaagaaccgaaagctacgatcaaatattcggcatcttcgcagtgaagttcttcgaaacgtacttcgttttcttctatttctgcatattttttctgaagatggatattacgtttttccatttcggcaggatcgagttccaatgaggtgatgatgttgggagtacggtggtgggttctgccggtagtggcccacggacaacgggctatgacttcttcatctgtcaggcgtgtgcgctgttcgggcaatactactttttccatcatctgtccgataacgccgtctgccagaataatggcgggattgcggtatttgaaagccagatcaaaagctatacctacgaaatctgccatttcctgtactgatgcaggagccagggctatgaggcgatagtctccgtgaccgccgcctttcactgtttggaaatagtcggcctgactaggttggatggttcctaatccgggacctccgcgcatgacattgacaatcaggcaggggagttcggcaccggcaatgtacgagatgccttcctgctttaaactgacgccgggactggaggatgaggtcattaccattttaccgctcgctgcaccgccatataccatgttgattgctgcgacttcactttctgcctgcaacaccaccataccggtagtttcccaaggtttctcttcggccagcgtttccaatatttccgattggggagtgatgggatagccaaagtaaccgtctactccgatacggatagcggcgtgggctatggcttcatttcccttcattaaaacgacttcttctgccatatttgttacatttattgttgttttactttatacacagtgatgcatccgtccggacagactgtggcacatgatgcgcaaccattgcaggtatcttctaatacctggtgggcgaatgtgtatccttttttattcacttgtttggcattgagcgcgattacatgcagcggacatgccactacacatagattgcaacctttgcaacgctctgtgtctactacaatagcacctttaatctttgccatgggttagttattattgattatacatgtctttgttatagaaattcagaatattcataatcatgtcacgggcggaaacggccggactttccggattacgctcgatggcttccagataattgttcaaagcttgttgccagtctcccattttgcggtaggcgttacccagtaagtaatagggttcatcgttgacgtgcgcatcgtttcggatgaaattagttagcgcatgaatggctctttccgtatcaccctgttcgataagtgtctttatgtcctgtaattgttccgtcataaggcatgattgtctcattgttgtttacaaagatactctttatttgttatgaaagggaagattggagcagaaaaaacggctttcttgctaaaaacatttaaaaaaaggagagaaagatagggaaaaaatggaagaatgatttcttctaatggtttgattattatagaaatggtttcaagtgaaacggttgatagaggaacggtgttatttattcttaaaggggagacatgtttgaatggtatttgtcatggtgcttttggggaagtatatggtagatcgtttgtatgttttttagggggagttgtcaggttatctccccctaaaaaaagttttatgtattatcagaataaactgtcacggtataaatatatgggagaaaagactattttattacttcacctacatacatattatatgccttctgaccgtcattactgggattcatcttttttgcttcctcaccggtaacggtctgtttcatcagtttcttgcagtttactatcaaccacggctcgctattaccttgcttgtagaacgaaattttataattatcgctctgatccatcagcatattgcccattgatttggcttggtcgattacgcagaatgctacttctttgccgaataactggccgaaacctccccagcattctttaccgatttcgaattgttcatcgtttccggcagtaattgtcatacgtgaggatgccttgatttggtcatctatgctttgttctttgctgggagttgcattattggctgcttttatttcggtattaccctcagaaccaccgatgacagccggttgggcagggggagttaccggagtggcggtaacgattgttgttgcatttgatatcggagtagctgtcacgcccggagcaggagcaactgcaatttgtgagttgttcaagaccttgttgcccaatgtatcttggatggatttgaacagtgtgtctttcaagtcaatagtctctcttctgaatttgccgcagatgggagccagcttggtcttcgatttgtttaaagccatatcgtctacaatccattcctctgcactgtatttttctcctccgtcacgagcttcatcataccaataacggatacgggtcatttcgatatcacattttccgttttcgcaggtgataaacaactgataataaattctggttctgtccaatgacaatgcagaggaggagaataccagatattcttcgccacctgctgcaatggttccttcatcttcattggtgtaaagaacacgtgcattgaacttgccttcgggcttgaaacgttctgtggcccatttcagcatggtgccatatagctggtctttcgttaaagacggtgcctgtatctctgttttgaaagaaactttaccgtcattcatagttatcgctcccgccagatatttgggatctgtctgtgccatagcgatgaatggcagacataggagcattaaaaaaagaatcttcttcatagtaatattttttattttatattttaatctaagcaaagataggaataaaaaaaaagagaagctataatgcctctctttttttacttttattattattgcgtgaattttactttacaggtatcttttcaatgcgcttttggtgacgtccgccttcgaagccgctgttaaagaattcatccaatattttttcggccatttcatggtcaatgaatcgtcccggcattaccagaacattggcgtcattgtgctgacgtgacagatgggctatctcgggcatccagcatagtgccgcacggataccctgatgtttgttcaatgtcatgctgatgccttcaccgcttccgcaaattgccactccgggtccgcattctccggcttctatagccagtgcaagcggatgggcataatctgcatagtcacagctttctgtactgtatgtaccgaaatctttgcatgggtagcctttttcagttaaccatgtctttacaaactctttcagttcaaatcctgcatgatcggatgccagtcctacttttttcatgccagcatttcttttacttggttatacacgttctgtgcggtaaagcccagcttttcatccaatactttgtaaggagcggagaatccgaatgattccagaccgaataccttaccgttggcacctaccaaaccttcaaggtttacaggaagaccggcagtcagaccgaatactttagcccctgtgggaatgatactgttttgatattccttgctttggctgcggaacaatccctcagaaggagcggatacgatacgtatttttatgccatccttgcggagaagttctgcacctgcctccaaagtggaaacttcggaacctgaagcgactaggattacatccggattttcatcggagcctgcaacaatataagcgcctttggcagcctgtgagtagtcgtttcctgcaggcagattcgcgatattctggcgggagaagatcagtgcggtgggggtgctggtattttccatggccaatttccatgccacagtggtttcttccgcatctgccggacggagtaccaacatagaattgtgtcctttgtggtttttcagtttttccatcaggcggatttgtgcttcttgttctaccggttcgtgagtaggaccgtcttcacctacacggaatgcgtcgtgtgtccagatgaatttgacgggaagttccatcaaggcagccatacgtatggcgggtttcatgtagtctgagaatacgaagaaggtagcgcatgcagcaatcacacctccgtgaagtgccatacccaggcagcagcaagccatggttaattcggaaacacctgcctgcagaaatgcaccggtgaagtcgtcttttgtgaatgcatgtgttttcttcaagaaaccgtcggtcttgtctgaatttgacaggtcggcagaagaaacgatcatgttttctacttctgtagccagtacaccgagaactttggcagaagcgctgcgtgtagcatctccggctttttgttcgataacattccaatttactttcggagctttgccagagaaccatagttccaatttagcagccagttcggggttagctttagtccattcagctttagccgcatatttttctgcaacaatttttttcagttcctctgcacgtttggcatacaactcttttacttcagggaagatttggaaaggattggttggatcgccgcctaagttcttgattgtattgatgtaagcatcacctcccaaaggagcaccgtgggtggcacagttacgttcataactggaatcatccgctttgcgtgcgcctttacccataatggtcttaccgataattaatgtgggctgaccggttacggctttcgcttctgtcagagccgtgcggattgcatcgggatcattaccgtcgatggtaattactttccagtgccatgcttcgtatttcttggcaacatcttcgctggtaacagcatcggtagcggtagacagctggatgtcgtttgaatcataaaacatgatcaagttgtccagccccaaatgacctgccagacggcctgcaccctgagaaatctcttcttgaatacccccatcggatatataggcatagatggtctggtccatgacatgacccagacgggctttcagaaatttggcagcgatagcagcacctactgcaaaagtgtgtccttgtcctaacgggccggaagtattttcaataccgcgcatgatgtccacttcagggtgtcccggagtcggactgccccattggcggaactgtgccagttcttccatggtgaacttgccggtcagtgccaaagtggaatacagcatcggtgacatgtggcctggatcaaggaagaaacggtcacgcccttcccaacgcggattttcaggatcgtaaactaaaaactcagagaaaagcacgtttacaaaatcagcgccacccatagctccacccgggtgtcctgaattagctttctctaccatcgaagcagccagaatacggatgttgtccgctgcacggttcataagtttcttttcgttcatattaaaataatattataatttgaatgctattagtgagtcggtttatctttgctattttatttaatatctgcaaagataactctttatgtgtaaaccgcaacatgtaaagaggctcttttttaagcccgtttgactcacttcttaaatcgggtcgctgcttcttcaacaggcagtcctgccttatagttttcgatatatgtgttgaatccggctacatcttcggctgttggcgatatttcaataccggcatcaccggcgaatactttgtcttccagaaaatctgccagggattgtttcttttcattgttgacaaggtaagaacctagcagggcgattccccatgcgccaccttcaccggcagtttccattacggaaataggggagtttatagctgctgcaagtattctctggcctacacctttcgttttgaataatccgccgtgtcctgtgattctgtctactttgattttctcttcattgaaaagaatgtcattacctatcttaagaactccgactgaagcgtataaatgggtacgcataaagttggcgaggttgaatttgtcatttgcagaacgtacaaacaatggccttccgtcggcaagtcctgtcacgggttcacctgaaatataattatacgaaataagaccaccgcaatctgcatcgcctgcgagggcatgattgtaaagttttccatataattcattcatatctacgggtatacccagcagttcttggtattctttgaacagattgatccaggcattgaggtcggaggtgcagttgttgcaatgtaccatagctacaaggcttccgtcgggagtggtaaccatgtcaatcatttcgtatggcttggacaactctttttccaatacaatcatggaaaatgaggaagtgcctgctgatacattcccggtgcgttgcttgacagcgttggttgctaccatgccggttccggcatctccttccggagggcagacaggtacacctgctttcaaatggcccgacacgtccagcctcttggcaccttccggggtaaggaaccctgcattctcgccggcgggtaagactttgggcaggatatctgtcagtttccaagggtatcctttaggagctaccaacttgtcgaacttggctatcatttcggcagaataattcttggtagccgggtctatgggaagcattcctgatgcatcacctatgcccaggactttctgacctgtaatttgccaatgaatgaaacctgcaagggtggtcagatagtcaatgttacttacgtgttcttcattgtctaaaatagcttggtataaatgagaaatgctccatctcagaggaatgttatatacgaataattcagataaagcggcggctgccggaccggtattggtatttctccatgtacggaaaggtacaaggatttcttcttcttctttattgaatgccatataaccatgcatcatggcactgacaccgattgccgccaaggtttctatttctgtgtcatatagcttttttacgttggaacggagatctgcatagcagtcttgcaggccatgccagatagcttccacactgtaagtccacagtctgtctaccagttggttttcccagctatggcttccctgggcaatgggcttgttttcctggtcaatcaaaacagctttgattcgtgttgatccgaattctatgcctagaatagcttttcctgcttcgatggttgattttgcatctgatttcatattaaaacctataatttaaggtacaacaataatgatgataaaataaggtgggatgtgccaagaatcttattagccttgacacatcccctcttcatggatgaattagcaaagtgctttgttcagcatatagtagacttcgttcatgcgaagctctttcttgaagttgctgatggtagtatctttgtcgatacggatcatttcgatacctgcaatctcagcatagtcttcccaatattctgctgtcagatcataagagaagcaagaatgatgtgttccacctgccaggatccatgcgcctgcacctacttcgaaattaggcatcggaatccacagggcggaagcaaccggtaatttgggcaacggtttcggctcgatgcattctacgtcgttcacgatcagacggaaacggttacccaagtctactacagtggcggtacaacctgagcctacttttgaagtgaatacaagacgggctgtctggctcttgcgaatacctatgcctaggaagtgtacttccagacgtggtttggaagcggcgataagaggacaaacttccagcatatgtgattgcaggatagcactgtttgcaccatcgaagttcaatgtgtaatcttccaggaaagaacaacctttggaaagtccttggttcatcacccatacggtacggtagagagctgctgatttccagtcaccttccgcaccgaatccgtagccttcagccatcagacgctgggaagccagtcccggtatctgatcgaagtagctgccgtctgtttggcccaaatcatcaaaattagtagtgaatcctttggcgcctttggctttaaggatggcacgaagagctaattcggcttttgcagcgttccatactttctgataagcttcggttgatttatcttctaatgaagcatcgtggtcgtattcgttgaagtaagttgctacaagtgcctctacatctgtatccttgatgtttttatggtattccatcagttcgcttgccggacagtaatctacgtgataccccatacgttgttctgcttccactttatcaccgtcagttacagctacattattcatctgatcgccgaaacggatgatcagcatatcctgagagtctgcccaacctgcacaaacgcgcatccaaacggcaatcttgtgctgggtgtcttcgtctttccagtaacctaccactactttgcggcggatgcgcatacgggtacagatatgtccgaattcgcggtcaccatgggcggattgattcagattcatgaagtccatatccatggtatcccaaggaatttccttattgaattgagtgtgtagatgtaacagtggtttctttaactgttgcagaccgtgaatccacattttagctggggagaaagtgtgcatccaagtgatgacaccgatacatttttcatcgttgttggctgctttgaacactgcttccacttctttggaagagttggctgttcctttatatactacttttacaggaagtttccctgattcgttcagtccgtttaccatttcattggagtgagcgtctactgctataactgcgtcacctccgtacagaagctgtgctcctgttacaaaccatacttcatactgatcaaatgctttttccataatgttatattttaaaagggttattaatttctttgtttcttatttctgtccataataggcattggggccgtgtttgcggctgaaatgcttttctattaataaagaattcatcgttaaatgagggttggcggcaaaagcgatacttgccattttggctacctgttccatgactactgcattatgtacagcatcattggcatcttttccccatgcaaaaggaccatgattttttactagtactcccggagtatgtacagggttcaggttcttgaaacgtttcacaatcacattgcctgtttcctgttcgtaggcaccttttacttcctcttcagtcatatctgcggtacaaggaatggcgtcatggaaataatcggcatgagtcgttccgatattggggatatccattccggcttgtgcccaggcggtagcataggtggagtgggtatgtaccactccacctatttcggggaatgctttatatagaactacatgggtgggagtatctgaagacggacgaagagaaccttctaccacgttgccgtccagatctactacaaccatgtcttcagctttcatatcatcgtatgatacgccactgggtttgattactaccagacctgtttcacgatcgatggcagaaacatttccccatgtaaaaataactagtccgtgtttcaccaaatccagattggcacggaatactttttcttttaatttttctaacataatgaataattgggtaatgtggcaatctgctaatttgtcaattggcaaattattgcatcggcacattattttaaagtttaaatttcggatcttttctgtaggccttatcattaaatttataaagataagcacctcgtcgggaacctgatttgtctatcaaatctgttttttcaatgaaatccatttcggctacccgcttgcggaaattccgcttgtccatcggttcgccatagattgcctcatatagattttgcaactgtgtcagggtaaacagttcgggcagcaggttaaaaccaattggattgtatgatgctttgtgcttcatcagttcacgtgctttggaaatcatgatcggatggtcgaaaatgagctgtggcagttcgtctatttttgtccaatgggcattgtgctgctgcactagttccctgtcatattcatttacattgactaaagcataataggctactgatatgactcgttctcccggatcgcgctctaagtcgccaaatgtgcctacttgttccatatatacattttccaatccggtcagttctgccaatacccgtttggcggcagcgtctacactttcgtcttcttgtacgaatcctcccatcaaagaccattttcccatagccggttcaaaatttcgttttagtagaagcagttttaattctccttcgtcaaaaccgaaaatgatacagtctacagatacatagaatttagggtttatgttataataggtggtcatggtttagcgtcggtttaaaattaacaggctgtattcttcaagataattcaaagcatacagcctttaatttatggtttaccagaaataagcatagaatagtgcacaaagcagaactacacctaaagaggtaataacatcccatttgttccaactctttctgataagttccttgtaactgccggtaaaggtgatggcttccacttgtttggcggttggagccggagtgaagcatgatacaacaaccattaacaacaagaggaatacaagtagccatatttcaaaaataagccagtttgtctgccaaaaccaagttgtattttcccaaaaccagccggtcatcacatcttttccggtattggtgaggatattagtcagcaaacggagcataccaattaggaaacctacaatcatggctgtttcaccggctttcggagtgattttcttggagaatataccaagtgcaaatacggctaccattgcaggtgcaaggagggactgtatgccttgcaggtagtcgtaaaggctgccgaggctcatcattacaggaatccatgccatgccgaggataactacaactacggtggcgatacgtcctaccataacataagtagcttcacttttgtttttaaacatgggcttgtaaaagtcttctgtaaaaagtgtggcgcatgaattaaagaaagcagccagtgaagcaaccaatgcgcagatgaatccgatagttacaataccttttacaccggcaggcagaacatcctttaccattacagcaaaagccgcatctgtatttgacatatcaaattcaccttttgcagccaaggcggcagctaccatccccggaataagaaacatgaagacaggcaggattttaaaataaccggctgcaatagtacctctgcgggcacgcttcattaccacatcattatcttcgcctttacgctgtccaagtacacgctgtacgatatgctggtcggtacaccaataccagaaaccgatgatggaagctccgataaatacccagaatccaggataatcttgatacatcgggtctgcttcggtccagtgaaacatatggttggcaccataagcgtgtccgtctgctcctacattcatggcgctacgcgcatgatccatcatttctgtccatcctgtagcaatattaccgtctcccaaggctgacagtcccaggaaaagaaccaagaaagaaccgatgattaaaataggggtttgaatagctgagagggtcattactcctttcattccactcagtacggtgaagatgccggtcaggacaataagtccgattgccccataccaaaaaggaagtccaagtaagaattccaaaaagatacctccggtataggcggttacactaactttagtaagaatgtaggctatcagtgtgatgatagaaagccatgaaccggtacgcggggtataacggtatttaaggaaatcgggcatggtaatgattttgcccattttattgtttaatagttggtagaatggaacaaaaagccatcctagaagaagaatcatccaaccttgcatttcccagtgtgccatacctactccggatttggcaccggttcctgccaaacctaccagatgttccgaaccgatattggctgcaaagatagcagcaccaatgatgtaccatggctcacctttgccaaatagataatcttcactgcttgctccttgttgcgagcgtttgtctttttgtacagagcgccataccgcccatatcacagctacaatgccgactgccagtattgtccagtccagccagatgaattcatgtgaattccaattcatgatattaaatatttaaagtttaacaattatttttcaacaccgaatttaaagatacattggctgtgataggtctgtcccggttccagaattacagaaggccattgtgatttgttggggctgtcgggatagtgctgtgtttccagacaaacagacgcgcgttgcggataagtaattccctttttcccttttacggttccatccaaaaagttgcctgtataaacttgtattcccggttcattagtatatacttccaaagtgataccactagtagggctggtcagtttggcagccagctggttgatatcgcctttcgtgttaagtacccaattatggtcgaagccgttaccgaattttatttgttcgttttcaaagttagtcacatcgggggcaatggttttaggagtattgaaatcaaacggagtttctgttactgccatcatttctccagtggtcatgaatgtgctgtcaacgggagtgatgctgtctgcatttacataaagaatatggtcggtggccggattggcaggatttccactcaagttgaaataagagtggttggtcatattgataacagtctttttgtcagttgtcgcttcgtaatttatgtcgatggcattgtctcttgtcagtgcataagtaacagtagcggttacatttcccggaaaattggcatctccatccggtgacttcatagtcagtgtcatagtactgtcgtttaattggtttgcttcataaacttggtattgccatcctttaggacctccatgcaggcagtgaccaaaattattttggggtaattgaatggtttctccatccattacgatgactcctttattaatgcggttggcatagcgtccgatagaagcaccgaagtcgcttggtatattttggtagtcagcaatgctgtcaaaacccagcactacgtcttttagatttccatttttgtcggggaccatgatagatacaatacgtccgccaaaattagttacgcatacttccattccggctgcattctttagcgtatacagtttaacaggttttacgccatccactattgtttcataattagtggggtttaatccggactttgtaagtgtttcttgagattgtttgggagcgcaagcacttaacaaggtcagtgcgataccggttcccagaaaggttcttttcatgcttttcatgatataaaagtactaattagtaatagagtatatgattttgggtgtaaaagtaacactattactaatacattggatatgaaaagagtatgttgtgcaacataaaagtgtatttcctacacttttatagcataaagaagaaaaaaccgctttgaatccaaagcggttttttcatatgttagcgaatttgagatcttttttataccagcttgcgagaaccgtcactgatgactacatcgtaaactttgggacttcttccgaacttctctttgaatctttctttggcagtggtgatgaatgtttcgtatagttcatttttaactaggttgattgtacatccaccgaaacctccacccatgacacgtgaaccggtgacaccgcagtcgaaagcaacatcattcaagaagtcaagttcttcacagcttacttcatacaatttactcatgccatagtgagtttcatacatcttctgtcctacggtttcgtaatcacctctttccaaagcatcgcaaacatcaagtacacgttggatttcttcaatgacgtattctgcacgcatatagtcttcttcactgatctcggcttttgcttcctgcaacatttccattgtacaatcacgtaaaaattctacatgaggatgttttttctggatggcggctacagcagcttcgcagctttggcgacgtttattataagcagaagaagccaattcgtgtttgactaccgagtcaaccaataccaatcggtaaccttccggtttgaacgggaagtattgatattccaatgaacgacagtccaaacggatcaaactaccttcttttccgaatacagatgcaaattgatccataataccgcaatttacaccacaataattatgttctgttgcctgacctactttggctaattcaaatttatctattttgttgtcaccgaaaagttcgttgatagcaaaagcatacgtactttccaatgcagcagatgaagacatacctgcacccaaaggtacgtcacccgcaaaagcagtgtcaaaacctttcacatctacaccacgtttgatcatttcgcggcaaacgccgaaaatatatcttgcccaactggctttaggagcatcttcttcgttcaagccgaattctacatagtcttttagatcaatagaataagcacgtaccttatcagtaccattaggtttgatttcagcaatcatacctttatctactgctccgggaaagacaaaaccaccgttatagtcggtatgttctccaataaggtttatacgtccgggtgatgcatatactgaacctgttgtgccatcaaaatgtttgatgaagcgacttcttacgtattctatatccatgatattaatagtttaaagttaatactatatgtttttataattattctacaggaatgtctttgtttacgttcttgcatcctaccaaaccatagaacaacagataagcaagcaaagcgataattaaccaatagctggccatatatcccacagcgtcagaaatgaattgctgtagtaatgggaaaataccgccaccgacaaccatcatcataaaaatacctgaagcttgtgcggtatatttgcctaaaccttctacagcgaggttgaagatacctccccacataatggacgtacataaaccacaaagtaccaaaaatagggcactgacaggtacagaggccatttcgaatccattttctacactatatcccggcatagagacagtgatttcttttggagtgaagattgcgattaatataaaacagatagctgttgcggaaacaacaatcaattgtgtgcgtgtagctactttaccgctgatgacactacttgcagaacgtcccactaacatgagcaaccaatagatggcagcaatagcaccaccgatagcggcaccgttggcaagcaggcccgcacctttttccgttgggtcggcaagatagaaatttaatgtgcctggaataccgatttcaatacctacatacacaaagataccgattacacctaatacagtatggcggaaattccaaggactatgagagaatttctctttttcatgacctgcttttcttagatgaggctctggaatggcgatgaatgaaagagcgataaacgctgatacgaatacacccattgcgatgaaaagcagaggagctacatctgacatagctgtttgaggggtaacagaaccaatcaaggcacctacgaaaagcggagtcaaagtacctgacaatgagtttagagcaccaccggcttggattaattggttacctttgttaccaccaccacctaaaagatttagcatcgggttaactacagtgttcagcatacatacacaaaaaccacagacgaaggcaccaagcagatagatgataaaattcattttaatggcatattctcctaaattgaatacgtctatatctgcaccgaacaaactggaaatatattggataaacaaaccgatgaaacctactgccatggcaatgagggctgtttttttatatccgatttttacaagcatattacctgaaggaatccccataaacagatatgcgaggaaattcatcatatttcccatcatacccaaggtattggcacctgcatattggtttttccatattgtgccgaaaggcgcagcaagattagtaacgaaggaaatcatcgcgaaaaggaagaacattgtaatgatagcgatgatattaccgttctgtttttgttgattcatggttttgaaaaaattataagtttattaattaggttatttcataaaattatttttctacaccgaatttgtagatggttacttgattgtaagtttcccccggatgtagaacacaagaagggaaatggcctttattgggcgtatcaggaaaatgttgtgcttcaaaacagatggcacttcttgctgggaaagttgctccatgagcaccttcgaaaccattgtgccagtttgaagtataaacttgtacaccgggctctgtagtgtatacttccatgctacgaccgctttcgggctccacacattttgctgcaaaactcagtgtgcctgcttcacgtttgtttaatacatagcagtggtcatagccggcaccgaattctagctgttcgaatgggtcattgattctactgtctactctttgaggagtacgaaaatccataggagtaccttctactttggcaatttcgcctgtagggatggatacattatctatcggagtataaaaatcagcattaatggttacgatgttgttatcaacggttgccgtaggattggcaatgcctgataggctgaaaaaaccgtggtgagtaagatttaccaatgttgttttgtctgttgtagcgtggtaagtaatgatgaattcattttgattacttaaagtgtacgttacgtgaatatccaaatttcctggaaatccttcttcgccatcagcagataaataatgcaatttcaagctttggggagtttcctgttctgcatcccaaatgcgggtatgaaatccggtaggaccgccatgcagcgagttgggaccattgttgatagtcagtgaatattctttcccttctaaaatgaatttgcctcctgctatacggtttccgtaacgaccgataagagtactgaggaaaggttcgtggctattgataacatgggttatactatcatgtccttgaatgacattggcatatttaccgtttttgtccggaaccataatagctaatactgctccaccatagttggtgacagctatttcagctccgttttcatttttcagaatgaagaggtctgtttgtttcccgttcactgttgtctgaaaatcggcccgtttcaggccgcataaattctcatcggaagtagatgtgtttatcatgttattgaaaatctttttattttatgtataaaactaatgcaaataaaaagattttcttcggtattcccaaactttttctataaaagtgaacggactaaacgtgaaattttaataaatccgcaacgataaagctgcttcctccaacaaaaataaagtcatttttgttagccttttctttagcggctgttacagctgtttctacatcaggataagtatctccgtgcagcccggattgcatcgctaagctttgtaattctttttcggataaagcacgctttacgctggctttggtaaaataataggtggcatttttaggaagcatggacaatactccactgatatccttgtcgtttaccatacctattacaatgtgtaatcgttcatatttctgatgttctaattgttctatgatatacgaaatacctcctacattatgtcctgtatcgcatattaaagtcggttcactttctaatttttgccatcttcccatcaggccggtgagttcacatacttgtgagaatcctttgcgtatattgctttcggtaagttgataacctgcttgttttaataggcggatggcagataaaagtgtattggtgtttttaagttggcaaagcccttccagttcgccttccagattgaggtagtcggttgtttgatatattcgtttacctttttcatttatgctggaggagtgtaataactgttcttcttctgcaaagtagataggagcgtttacttctttagcacgggttgtaaatataggtttggtttcgggtgtggtttcaccgataactaccggggtcttttctttgatgattccggccttctctgtggctattttggctaatgtgttacctaagaattgtatatggtcgaaactgatattggttatgacacatagatccggacggatgatgtttgtacaatctattcgtcctcccaggccgacttctataatggctacatctacttggctttgggcaaaatagtggaaagccattgcagtagtcagttcaaagaaagaaggatgcagaggttcaaaaaaggcacggtgtttttctacaaagtctatgacatattctttggatacaggaattccgttgacgcggattcgttcacggaaatctatcagatgtggagaagtgtaaagtcctgtcttgtatccggctgattgtaaaatggcggctaaagtatgtgaacaagagccttttccattggtcccggctatatgaatggttcggaattggcgatggggatggttgaaatacttgtctaaaagataagtgttttctaaccctgccttgtatgcatcttttcctatatgttggaataatggggcactattatataaataatccaatgtttcttcgtaattcatggcaaatgtttttatttaccgcaaagtgtcacaaaagaatgccaggcagatataaaacctggtattctttctgtgacactttgtagtataaaaattaatcgaagaagtttttgaacttcttgaatattttttctttaatgcttgtattcggtttgaagttatccgattcttgcattttctctagtgcttgtttttcatctttattcaacgtttctggaatatatacgcttacattgactaataaatcacctgtaccgttactgtaaccataactattgacattgggcaatcctttacctcttaggcgtaagaccttacctggttgggtgcctggttcaatttttacttttactttgctatcaatagttggtatttctacagtgcctcctaaagcagcagtcggaacgcttagtaacagattgtaaatcaaatcattttcatcgcgtattaggtctggatgggattcttcttctatgacaacaagcaaatcaccgggaacaccgttatgtttgcccgcatttcctttcccattgacagaaagttgcattccttcagccacaccggcaggaattttcacttccacgacttcttctccgtatacaataccttctcctgcacaagctttacatttgttcttaattattttcccttctccgttacattgtggacatacgctttgtgattgcaccattccaaaaatgctttgttgggtgcgggtgatacttcctgttccatgacaagtgggacacgtttccgttcctccttctccttcggctcctgaaccatggcaatggtcacatgttacgtactttttcagtttgaatttcttttctactcccgtagaaatctcttttaagttcagttttacttttacacggaggtctgaaccacggaacttgcgttgtgcggaacgtccgccaccaccgaaacctccaaagcctccgaaacctcctccatgtccaccgaagatgtcaccgaacatagagaaaatatcatccatggacataccttgtccgaatccttcaaaaccgccaccggcagctccactcattcctgcatgtccgaattggtcgtaacgggcgcgtttatccgggttgctcaacacatcataagcttcggcagcttccttgaatttttcttccgcttctttatctcccggattcttgtccggatgatattgtattgcttttttgcggtatgctttttttataacatcaagggtggctgttttgtccacctccagaacttcgtaatagtctctttttgccatgtcgttttatgatactgtttattgagccacaactactttggcgtggcgtattactttgtcattcagcttataaccggtttgtacacagtccaatatttttcctttcttctcttcggaaggagctggaactaatgcaattgcttcgtgataatcggtatcaaagttctcaccgtcagtctctattttctgaagtccttcctggttcaatactttcaggaatttgttgtagatcaactcaattccttcacgcattgcttttacatcatccgaagtttctgaagtctttactgcacgctccaagtcatccaaaataggaagaatggcagtaatggccttttctccaccatttttaatcaattcggccttctctttcatggtgcgtttacggtaattgtcaaattcggctgaaagacgcaggtatttgtcatgctgctcttctattgttttctgagcttccgccaattccttgttcaccttctcttcagcgttcagttcttctgttgcttctttctgagtttcttcatcaatggcagcttctgccgcttcctgatttttcaaaacttcctcgtcttgaggttggttcttctctgttgggttcatattcttattaaactttttgtttttcttatttttactcataacagtcaggtcttttaggttaatttactgctaacaaatttcgtgcctagttgttttcttagagtaataattttgcaaaagtacggaatttctgccacactggcatacttttctgaattaaaatgcctacctttgcaattccaaaatagaataattatataaataaggtatattaggatgattacagtttcgaacttggccattcaatttggtaaaagagtgttgtataatgacgtaaatatgaagttcaccaatggtaatatttacggggttatcggtgcgaacggcgccggaaaatctactttcttgaaagcaatttcaggtgagctggaaccgactaagggctcagtggtattaggaccgggcgaacgtctgtctgtattgagccaggatcactttaagtgggatgaatatacagtcatggatacggttatgatgggacatactgtgttgtggaacattatgaaacagcgtgaagaactgtatgcgaaaactgattttacagatgaagatggcttgaaagtttctgaattggaagagaagtttgccgaactggatggttggaatgccgagagtgatgctgcttctttgttgagcggattgggcataaaggaagacaagcactatatgttgatgggggaactgagcggtaaggaaaaggtgcgtgtcatgttggcgcaggcactttacggtaatcctgataacttgttgttggatgaacctaccaatgatttggatatggatacggtgacttggttggaggaatatctttctaatttcgagcacacggtgttggtggtaagtcatgaccgtcactttttggactctgtttgtactcatactgtagatattgatttcggtaaagtgaatatgtttgccggtaactatagcttctggtatgaatcaagtcagttggcacttcgccagcagcagaaccagaaggctaaagctgaagagaagaagaaagagttggaagaatttatccgtcgttttagtgccaatgtggctaagagcaagcagacaaccagccgaaagaagatgttggaaaaactgaatgtagatgaaattaagccgtcgtcccgtaaatatcccggtatcatctttactccggatcgtgaaccgggcaatcagattttggaagtatccggcttgcgtgcggaaactgaagacggtatggtattgttcaatgatgtgaattttaatgtagaaaaaggagataagattgtctttttgagccgtgatccgcgtgccatgactgctttttttgaaataatcaatggaaatcgtactccgcaggctggtaaattcgcgtggggcgttactattactacggcttatttgcctttggataatacggatttctttgaaagtgatttgaatttggtagattggctgagccagtttggcgaaggtaacgaagtctatatgaaaggtttcttggggcgtatgttgttttccggagaggaagtattgaagaaagtgaatgtgctttccggaggtgagaagatgcgttgtatgattgcccgtatgcagttgcgtaatgcgaactgtctgattttggatactccaaccaaccatttggacttggaatcaattcaggctttcaataataatctgaagacttataagggaaatgtgctgttctcttcccacgaccacgaatttattgaaacggtggcgaaccgtattattgaattgaccccgaatggtatcattgacaagatgatggaatacgatgaatacatcacttctgatcatattaaagaaatgcgtgcgcgtatgtatggagataattaaattataaatatgagctgaaaaagaaagagtcattgggagccattgttcctgtggctctttttttatggtttagccgcaattctcattctgtatgaaccataatgagttcaaaaaatctatgataatggacgataatccatgtcgttatattagaattaggattatttttgtgtccattaaaaacatgaaatgatacttatgaaaaacttaattttgattttgatttttgcagctgttggcttgaatacgatggcttccaatcctgtacatgtgattataactgccggacagtctaataccgatggacgaactcctaatgaagatttgccggcatatattaaagcattggctacggatacactgacgtatgccgaaggtgcctaccgttattgtcagatagctcagaatgacggaaagggagaatttattcctttctggcctcgtgccaaacgtagcggaaaaaataatatgtgggcttttgatgcagtgacatattattggttggagcagttgttgcaggagaaattttatgtggtgaaatgggctgttggcggaacttccatagcacctgattataatgcttccaagggacgtttttggtctgcggcgcctgaatggctggcacaggctaagccaacttctgatggaggaaactccttgttgctttctttcattcaagagatagacatgtgtatagacaagactctttcccgcctgaaggatggctatcagatagatgcatttctttggcatcagggggaaagtgattatgctaaaagtaaagattattaccgtaacttgaagacaatggtggcttatgtgcgtatgcatctgacagaaaaaaccggaaaggattattctcgtttgccttttatttttggtactgttgcccgaagtaataaatatttcagcagagaagtggagaatgcgatgaagcaattggctgctgaagatccgaacatgcacctgatagatatgtcaggcgcggaattgttaaatgacagacttcatttcacggctcattcggcagagtatttgggacaacaggtatataagcagttggaacaaattattaaaggagttaccgtcaggactgatgaattgaaaggaaaacgtttgggaattattggagatagttatgtgaagaatcataaggaacctgttaagaatacctggcattataaatttgccgagaaacatggtatggaatatttaaattatggcaagaacggcagcagcattgcttatagtagcccgcgttggggggaagcgatgtatgtaagatataaggaaatgccggatgatttggattatgttattgttgtgggtgggcacaatgatggttttaaattggattcaattggcggtattgatgtatttaaagagaggctggcaatgctgtgtgaagggcttattgaaaagtatcccacagctaagatttttttctttacccgatggaactgtaaaaattttgcaggaagtgatgctgagaaagtggtggatgctatgattgaggtttgtggaaattatagtattcctatttttgacagcgcccgaaaaggaggaatttatgcaagtaatgatcattttagaaaaatatattttcagaacagcaagaataatacagatactgcacatttgaatgaaaaaggtcatgaacgtttcttgaaagtggctgagagttttatattgcaatactgaataatgtaaatgtaatggattatttttaaaatgtgatgacgcagaaataatccatttacaattttcttacagttcggagaaaaaagtaaggtattttctctccgctagggaaagtaattctcttttgatctttgtatttttcttgaaccagttcatttctatatgtgttgtttgtttttgtatgactttattccaatttccaactatttgcccgttgtacagaataaccggacggaatatcccgaaagaattgaatgctttgtgttggtattctttgttcaatacatcagtacggtctttgtagctgattaggtattcatcgtatgaaggaagaatatgcaatatgtcggttgttttttcttctttataagactgatgaacatataatttttgtgctaggaaacggtcagtaagcaattcttgttcaatggcggctataccttgtctagcttccgttaccgaaagtccggaccaccatacaaagtctttcagactggcaggagagtggcttctaaaatacttgcgtgccaagatagctagcgcctcttctttatgtaattcttgtattggaggaacacgctcatccaaaagtgcgaaggtgattttattatttttatctgctccgctgcaaataagtccttcagcttcagcgtgaatcaggaaacggttggataatctttcattggtttccagccctccttctttaaatatgttgtcaatttcttgcttggtcagatgattgtgtcctgctagtgccttttccaataatcggtttgctttgttgtaaatgtcaactgaaatgtcttgtcctctggacttggcaaaagagtcattggcagtaatgatgcgtcgggatgaaagcttcagcatccagcgtatatcttctgcagctacataatgccaagtaggacgcatgacatgaatgcgcaatatatctccttttgccagtgcctcattgactgtttgcagatttcctgcctttagccggataccaatagcccatttggacatggtgtaatcttgcgcttgaatgcctcccatccatgatacaagatctttcggattattgaaaaccggatttattaactgttggctgtgcagacggatggtaggtatcatttcagataatttccatcaaacgataaaggtaaaagtccgcttacgttttctaatatataaatatcagtcttactataaagcagtatccgcataggttttccatatcgtttttcagtttctaataatacttgccgacaggctccgcaaggaggaataggtgtgtcaagaaaaccattttctgtgcgggcagcaatggcgagtgtttttactgcttgatccggatattgagaattggcataaaacaaagtggtacgttctgcacaaagaccagatgggtaggctgcattttcttgattggttccggtaatgacgatatcattttccaacagtgcggcggctccaacagcaaaatgtgagtaaggagcatagcttcttttcgttgcttcacacgcggcgtctatcagtttgcggtccttctctgttagttcgtcataatggcaagcctctatgtttatttccagtttgatttgtttcatgatacgttcctctttgttttcttgcaaatgtaatgttttgtttttaatctcccaatgtttcttttctaaaatctggttttaaatttatttgttttcttattgcttgtcagagttgaatgtgagaagaataatatagttaccgataaaaaaaggagaaagttgcaactttttttttatttgtgcgtctaatgaatatataattaaaaaagagaaagattatgttagcaacaacaacacctactatcgaaggaaaacgtataaccaaatattatggcattgtaacaggtgaaactattatcggtgctaatctgtttcgtgatttttttgctagtattcgtgacattgtaggcggtcgttccggttcttatgaagaagtacttcgacaggctaaagatactgcgttacgagaaatgcaggatcaggctgctttattgggagctaatgctgtagttggggtggatttggattatgaaactgtgggggacagcggtagtatgctgatggtaaccgcaagcggcacagctgtcagaatagaagattgaggtaaagcagatgtgcctgttgcaatattttttaggtttattgcaacaggtacgtttgcttttactgtattagggtattcctaatatctctttggccttgtttttacttgaaatgaaatctagtgagttgacaatattatcgtaatttgttgtgtcagctatatggtctttcagtacttgtaacatttttaacttgtcattatcaaaagtataaagtgacataagtttaaggcattgtgcgcaacttaattttttatttataatggctttttccagagttgaatctttgaatacggaattttttgtttcattgtatatcttttcaaattcgttatcgtctattgaaccaacggtatcgagggatattttgctggaatataggtctcctactgaagtctctttagctatttcattgtaggaatccatgcttgttacctttccgtttcgaaattcgataattagaaatttgcaagacgttgcaattcctccgctctgatattcccattgttccaaagaaccatcgaaacgtcggaaatcgggttttccaagaagttggcctatttcttctgttgtcattccctgctgtactttccatgctttctgtttgatacttcctgtggtatgacagctgacaagtgttatactgataacaagcaataatagttgtttgaattttctcatatatttatgtttttgtgtgttgtttaggttgaattaccattggttagtgattcccaatattttacgtgcatcatcttgtttaaataaagaatccagtgtcttgatgatttcttttccattttcacggtctacaatgcggttggaaatcattcttaatactttcattttttcatcgtcccatgtaaatatggacatgagtcgggcagtttgtttacaggtgaagtagttgtttacaactcctacagataataattccatttggtcgtccttaaatgctttgttttttacttttttatagaggttttcaaaatcatgtggattcatggctttgtgttttggtctgtgcgggccagaatgatcagggtggttgggtggaactaccgtaatgatttcatttggcggacacactgcaactggaggcggagtaatgttggactcaaaagaatccatgtttgttaccattccgtctacaaaatcgataataattaccgtgtttgcagctgtggacatattggtcttggtatattcccattgttccgagccgttgtcgaatctacggaaatcgggtttcccaagtaaatggctgacttcttcttgggacatccctctctgtactttcataatagtgctactagtagtcaaactgcaactgatgactaaagtacaaatggttaacgctaataatgtttgtttcaatcttctcatttttttgtttttttgtttgtaacccttaattccgcaacactattacaaatataactttttaagtacctgagcaacaaaaagttgctcaggaatttgccatgtcagatttttcacctatcttagtgttgcaaatcaaaatatgtatcaaacccgacagacatggcaaaggtagcaattaaatccgagaaactcactccttttggaggaatattttcaataatggagcaatttgactccagactctcatctgtaatcgactcaaccctcggtatgagatgcaggctgtatggttatcaatacagcgaaatcatccgttcgcttatgagcgtttatttttgtggcggctcatgcatcgaggatgtcaccactcatctgatgtaccacctttcgcttcatccgacacttcgcacatgcagtgccgacacgattcttagagccataaaggaactgacccaggataacatttcctacacatccgacactggcaagacctacgacttcaacacggcagacaagctgaatacactgctcctcaattgcctattgtccacagggcagctgaaagagggcgaggggtatgacgttgacttcgaccaccagttcatagaggctgagaagtttgatgcgaagcctacatacaagaagttccttggttatcgccctggcgtggcggttattggcaacttgattgtcggcattgagaacagcgacggcaacacaaatgtccgtttccaccagaaggacacgctgaagaggttctttgaaaggtttgaacaaaacaagcttattatcaaccgtttcagagctgattgcggctcgtgttctgaagagatagtggaagagattgctaaacactgcaagaccttctatatccgtgctaaccgatgcagttcgctctacaatgacatctttgccctcagaggttggaagaaagtggaattgggcggcattgagtttgagctggcctccattctcatcgagaaatggaaagggaaggcataccgtcttgtgattcaaagacagaagcggatagacggcgaactcgacctgtgggaaggagaatacacctaccgctgcatccttacaaatgactacgagtcttccgagaaagagattgtcgaattctataacctccgtggagggaaggaacgcatcttcgatgatatgaataacggattcggctggaacaggcttccaaaatcctttatgggagaaaacacggtgtttcttctgcttatggcactcatacgcaacttctataaattcatcatggcgaggcttgacgtgaagaggttcggactcaaagcaacaagccgcatcaagacgtttgtctttaagttcatctctgtgccagccaaatgggtcaggacatcaaggaagtatgtgctgaatatctattcatgcaacaatgcttatgccaatgtgttccagaatgactttggataacaccgacaacttatagtcgtgattttgcgtattgcctcaagtcgcatggtggggtaaggggcatttatatgtctttatggtgacattcgatgcactgtgccccctttttactaacgatgcagattcttttcgcttctgtatcatattaggcgcgtagttgcggatttgagggtaacaaagataagttgggaaaaggtatattcttctatctttttccctatttatttttagggatttccctattgtttatatggtaattcttctaagaactgaaatttattgataggaagattgagtttgaattctttaaattcatattccggaagattggttgtatttttctcttgtaggaaatgtgattgattattttaacttcatctataattaatgtaaaaacttcattttcacttttaacttcttgttctcgggtggttctaacctataaacttttgacgaatagatgataaacgaagataaaattagggaagtatgggcttccaacccggaacggggatttaaattgttgatagatttttttcaacagcccatatattggcatatccggagattggttgtatcacatgaggatgcagaggatattctgcaggaagtctttattcgcgtctttcgccatcttcctcagtttagggaggaaagttcattggggacatggatttaccggatagcgaccaatgagtgtctccgttttctgaatatgcgtaaggaacaagctgtttcggcggaagaagttcaggaagagttaatgaataagttgatggcgtcagattatgtggattatgagaacgaaatggcggtgaaatttcagcaggctattttgatgcttcctgaaaagcagcgggtagttttcaatcttcgttattatgatgaactggaatatgaggaaattagcaggattacggacacgaaagtggatacgttgaaagtgaattatcattatgcaaaagagaagataaaagagtacatgataaataattaaagacaggatggaaaaggagtttgattttaagaatattgggaagcggatgccttatcgtacccctgatggctttttcggaaaaatgcagaagcaagtattggagcgtacacaggctgagaggtttaataggcagcatagaataaaattgattattggggctgctttagctattgcggctgtcatgttgggagttcttttctttccgatatcccaacctgtggcagaggagttgccttctccttcacttattgtttctacggatttagactcttcttattcagatactttggatcgttatatagaatctatgtctgatgaggaattagcaggatgggtggaattatctgaaaatgatatatttataaattgattaatcactaaaaacaaaaaaatgatgagaacaaaattttttttaatgatgttggcagccattgttatgggaagtcaggtaacactttttgcacaagaaaagaaaggagctaaatctgaaagaaggcagtttaataaagagcagatgctggaaatacagtgcaatcaaattataaaaggattggcattggatgacgcaacgactgctaaatttattccggtgtataaacaatacatggaagaaatgcgggctactcgtcatatgggagcctgtcgaaatattgcaaatagaacggctgcagataaacagacccccaaaccgcttcctacagatgctgaagtggagcaggctatcaaggcacgtttcgcgcagagtagaaagatactggatgttcgtgagaagtattataatgagttccggaaatttctttctcctaaacaaattcagaaaatgtataatatggagaaacacaatggcgataaattccgtaaagagatgagaaaaagacaaggaatgaaaaaacagcatgatgggagaagacatatgccacagggcgatgtgaagaaataaatatggatgaaaatgtaaaaattgtgctttcattgtctttatagctttattcttttagtggctgctgtttatggtagccactattttgttttctcagtggaagtatatatttttgtgaagctaatagtagctatttaactaataaaaacaatacgatgaaagtaaagaaattaagtggtaaagttcaagatgcacaacaaataccgaccttgtttgataatgagaacattacgtatcatcctattgatatagtgaactggaaagaatatccttatcaacctcaagtctcttttcgtatagcctatacaaatgatgctatattagtccattataaagtagtagaagacagtgttcgtgccaaatacggtgaagataacggtagtgtttggacagattcctgtgtggaatttttctctattcctgcgggagatggcatttattataatttggaatgtaactgtatcgctacgattcttttagcagcaggttcggagcgtaataatcgtgaaatggctccttctgaaataacggatcaggtgaagcgttgggctagcttgggcagagaaacttttgaagaaaagataggagaatgtacttgggaggtggctttgctgattccgtataaggtattttttaagcatgccattaccgggctggatggaatgagcatacgggctaatttttataaatgtggagatgaattgcaaaagcctcatttcttatcatggaatcctattaaaatagagaagccggattttcatcgtccggatttctttggacttttggaattcgaatgaaattcgtaattaatttaaaaagattgcatacagccggataaaaatggtaagtttgcaactatatatagcggaaaaagtatagtcgcgattttgaaacagttttatatgatgaaacatacgttgaaatttatattaatcgggttgttttgttgtctatgtaattttacagtgcaagcgcaaacccgtaaccggcagtatgaggaatatattcataagtataaagatctcgctatcgatgagatgaaacggtatcgtattcctgccagcatcactttggctcaaggattattggaatcaggagcgggaaaaagtacactggctcgtaaatccaataatcatttcggtataaaatgtggtggtgactggactggtcgtactgtacggcatgatgatgatgcccgtaatgaatgttttcgtgcctataagcaccctcgtgattcatatgaagatcattctaaatttttaaaaggacgttcacgttatgcatctctttttaaattaaaaatcaccgattataaaggatgggcgcatgggctgaagaaagcgggatatgctactgaccctcgctatgcatatcgtttaattgatatcattgaattatatgaattacataagtatgataccaaggatggtataaagtggatgaaggaattcccaaacccgcatcagccttatttggctaatgatttactctatattgtggtacgtccgggggatacatttaaaaaactttctaaagaatttgatatcagtcaacgcaagttgaggaaatacaatgatctttataagggatatgtattgaagccaggagatattatttatttggataaaaagcatcgtcgtgcggataaggaacacatagttcatgttgtccgtgggggagaatctatgtattccatttcccaaaaatatggtattcgtctgaaaaatttatataagatgaataagatgaaaccggaagacccttctcctaaagtaggtgatatattgcgtttgcgttaatcattattgtacggtaactgatgtttaaaagcgtacagggtgtccgatatcggacaccctgtacgctttatttgttgttgattatcaataagttgtttccttggcacggatgttgtttattctttagcacaaaaatgataataataaaattacaataagttatggacagagaaattcctaaagaagtgcgtgataaggagcgcaaaaagaagttcattaaatatggtgcaataggtgtggcggcagtggtatgtatagctgtattgatttcgtttatgcgaagcagcgtcaataggaaagatttggtgttttcagaagtggacaatggaactattgaagtaagtgtcagtgcttccggtaaggttgttccggcttttgaagagattatcaactcacctattaatactcgtatcgtggaagtttaccgtaagggaggagacagtgtggatgtaggtacgccgattttgaaacttgatttgcagagtacggaaaccgaatacaagaaattactggatgaagaacagatgaaacgttatcagttagagcagttgaaagtgaataataatacgtatctgagtgatttatcgatgcaagtgaaaatttccgccatgaaattgaaccgtatggaggtggaacttcgtaacgaacgttatttggatagtttgggctctggaacaacggacaaggttcgtcaggctgaactgaactttaataccggaaaattggaattggaacagctccgtcagcaatacgcgaatgaatcgaaagtaaaagaggctgatttgaaagtgaaggagttggaattcaatattttctcaaagagtcttgctgaaatgaaacgtacattggatgacgctcaaattcgttcaccgcgtaaagcgattcttacctatataaataatcaggtaggtgcgcaggtagcggaaggcagccaggtagctatcatttctgatttgagccattttaaagtggaaggtgaaatagccgatacatacggtgaccgtgtggcagcaggtggacgtgccatagtcaagattggcaatgagaaactggaaggaacggtaagtagtgtgacaccgttgagtaagaatggggtgatttcgtttattgtacaattgaatgaagataataacaagcgattgcgttccggcttgaagacagatgtgtatgtcatgaatgccgtgaaggaaggagtcttaagattggcgaatgcttcttattatgtgggccggggtgaatacgaattatttgtccaggacagtaaggatgaaatcgtgaagcgtaaagttcagttgggcgacagcaactttgaatatgtggaagtcgtatcggggctgaagccgggtgacaaggtagttgtcagtgatatgagcagctataaaaacaagaataagttgaagttgaaatgagagcagctatgacataaacaacaagataaaactttctctcttaaattaaagtagcgggaaaccgggtggaagggaggcatattcccttctgctcgccccggatactgatgataattcgttctcattatgataaaatattattggaagcaggcctgggagctgctgaaacagcataaactgttcagtgtgctttatataacaggtgcgggattggctattgccatgactatggttgtttttgtggcacattatataagagtggcacctgtttatccggagacaaaccgtgctgagacgtgggttttgaagtctgttacggtgcaacgggtgaaaacccgtggaagtggcagttggcaaagctctcaccaattggtacgtgactggtggtatcccatgcaggaggccgagcaggtttctgctgtatataactcgtgggaattggatgactacattcaacgtgagaacttgggttcggaactgaatgtgaaagtgaaatataccgatcctgcttttttccgtatctttcaattctcttttttagctgggaagccattctcgcaggccgattttgagagtggtatcatgaatgcagtggtaggggaggacttggcacgtcgtctgttcggcaccacagaggtggttggcaagactttcagcttgaattatacggactgtcgcattgtgggagttgtgaaagatgcaagtttcctgacaagagactcctttgcacaattatatctgccttatactacagtggcaggctatgataaggattctaaaagtgatgccggtatgttgggaccctatacggtttatttcaaagtgaaggatgatgccatgggagcggctttggaggcggccatgcatgaaatggtccgtaaatataatacttcacaggaagagaataaattggttttatcaggtccggatgtttattggaaaagtgtctatcggcgtggaaatgttcctttggactggtgggagctgatacgtctttggggagggcttgttttgattttcttattggtgcctgctcttaatttatgtgcgatgatcagtacgcgcatggaaaaccgtcttccggaaatgggtatctgtaaagccttcggtgccgaccgcggacgtttgcttcgtcagatattgatcgagaatttgatattgacctgtttgggggggctgctgggcttatgttgggtctggacgatattgatagccggacgtaattgggtgtttactttgtttgagcgttacggaaattccgctcctgaaggagtagatacaatcgtcagttttgatatgctgttctctccatggattttctgtgcaggttttatcgtttgtcttttgctgaatttattctctgcattatggccggcgtggaaggcactgggtaaggatatcgtttattcattgaatcagaagaaataaaaggagggggatgcgatgctacatttgataggtaagaatttatgggcacgccgataccgcaatggctggttgttggcagagttgatcattgtatctatggtgatatgggtactgactgacccgattgtggtgactacccacgacagggggctgcctaccggtatcacagaggaaggaatgtacagactgaatcttgctgctgtctcttccaaatcagcgcgttttgaagcaggggaagacactccggaggcacgtgctgccaatgtacgacggattctttcgcgcattcgcgactatgaagatgtgcggtatgcaactttgcagtttagagacgtcggtccgttttgttccagttcatggagccgttcgttaaatacggactctttacattattatccctatatggtgatgttctttgagcctcagagccagtttttcagcacatttggatttgaggaagtggaagggcagactaacgaagaactggaccgtatgccttttgaaaataaagaagtcgttatgaccgtagatcctgtaccgggagtcgtttcattgggctatcgctatgttgattttaaaacggataccttgaactggattataaaagcaaccatcggtaaactacgtatgcgcaatggcatgcagccgcagaatgtattggccgagcctcaacagttggaaaaattcgaaataccggaagaggtatgtatcgttttccgtactaaaccggctataaacgaaacgcaatttatgcagcatttcagaccatgggcggagaaagagttgcgtgtgggtaatctatatatgcgtagtgtgaagagttatcatgaagtaatagcggacaatgatgaagagaatacggtgaattatacttatcgtgtgaatttactgatgggaggattcttcctgatcagtttatgtttaggagtttccggtaccttttggatgcagacacgcaaccgtcgggaggaagtgggtatcatgaaaagtttcggtgcccggtctgtctatatcatccgtatgttgctgggcgaagggatagtgctttctacgctggctactttgaccggttgtcttatttatttgcaatatgccttgaaagaagggctttataccaatatgtggaatgaacaggaaatacttcccatttattgggtgaatagattcccgcttcattttttaggagtgtcactgattgtatggattatcttgctgattgtggtcagtataggcatttatattcctgcacgcagcatcagccgcataactccggtggatgcattgcgggatgagtaggattaagatttaaaaaaaatgataaacggctgtaaaccggtctgtttataggtgtatggattttgagataactagtatgagataagattaacaatttaaatacgaaacgattatggcaatgattaaattaaccggtatcaataaaatctaccgtacgaatgagattgaaacattagcgctggaaaatgtaaatttggatgtggctaaaggggagtttgtcagcattatgggtccttccggttgcggcaagtctaccttgctgaatattatggggctgctggacgctcccagcagtggaaagattgaaataaacggcacgtctgtagaaagcatgaaggacaaggaactggctgctttccgtaacaagaccttgggctttgtattccagtcgttccacctgattaattcgctgaatgtgattgacaatgtggagttgcctttgctctatagaaagatggctgccaaggagcgtacccgtctggcaaaagaagtgttggatcgtgtcggtttaagtcatcgtatgcggcacatgcccacacagctttccggaggacagtgccagcgtgtagcgatagcccgtgctattgtgggtaatcctgaaattattcttgcggatgagcctaccggtaatctggactcaaagatgggtgcagaggtcatggaattgttgcataaattaaataaagaggatggacggaccattgtgatggtaacccataatgaagaacaagccaaacagacttccagaaccattcgtttctttgatgggcgtcaggtgcaataactactgattactatgaaaaggaatttattaagaaataacagagatgattaaacagtattttaagcaagctttggcgcaacttcgccagcatccgcttatcagtgtcatcagcattgcaggaactgctcttagcattttccttattatgttggtagtgatgctacaacaagtgaaggtcgctcctttttctcccgagtcaaaccggaatcgttttctgcatgtgcattatatgagcataagtcataaggattggggggacggaacaagtaacggaccgatgagcgtgcggacggcgcgtgaggtatataaatcattgaaaacccctgaagctgtcactatttattgcagtatgccggtatcgactcctgtttcattacccgctatgccggctattggagcggatgtgcgggaaacggatgatactttttttaaagtgttcgattttcgttttgtgaatggaaaaccatacgatgaagctactttcaatgcgggcactcctgtggctgtgattactgagagcatatcgcgggctttgtttggttccacagaatctgcgggcaaagagtttttgttgaatcatgctccctatcgtgtggtaggggtagtgaaagatgtatctactcttgccgatgcttcttatggccaagtatggattccctttacttcgacggatttgcctagtgatacgtggagtgaccagcacatggggatgatgagtgtcactattttggctcgaagccatgatgattttggagaaatccgtgctgaagccaagcggcgtatgagtgagtataattctattcttgccgatcaggggtatacgttgatagaccgtaaccggccatacgatcaggaaactcagtctatttcatttgcagctaacttggagccggatttgaagtcggctcgtcgtgaacgtgctatcatttttatcattctgttgttagtacctgctataaatctgagcagtatgacgcaaagccggttgcgccaacgtgtggcggaaataggagtacgccgtgcttttgggagcacccgcatggaaatggttggacaaataatcatggaaaacctggtcgtgactttgttggctggtgccgtaggtttgtttatcagtattgttatggcttatttaggtaccgatatcctgtttgcacagccttatagtgcgacattgaatgcccctacagttgattccagtattttattgcacccttccactttcctttatgcgttgttgttttgctttgttttgaatttgctgagtagcggcattcctgcttggagggcttcaaggactagcattgtcaatgcactgggaggaaggattcactaaggtgataacgaattaaaagtaaagaatcaagatgaataagaaactatttactcagataaaaaatgaatggcggtctaatctttggcttgtcaccgaattattgttggtaagtgtcgttttatggtatattgtggactatatgtatgtgcagacctcaatttataatgaaccacggggatttgatatttctcattgctatttggtgcaaatgggacgtcttacggacaaaagtccagactttattcccaatcagacagacgaggaaaagcggcaggatatcaaggaacttctaagtcgtcttcagcatagaccggatatagaggcagccggattaggacaaaattcttacccgtataatggcagtaacagcagtgcgtcagtggtgtatgatacattacgttcgccgggatggactatacgcagattggtgtctcccgattttgtccgtgtgttccgttatcgtggcacccgtggggagacccctgaacaactggctgagatgctgaaacatccgaagaatttcttagcttcagataatctttataaacggcgctatggatgtgatttgacttcattggtagacaaacaattttatttgttcggggatacaacgaatacatataatttagcagcttctttgcaggttgtgcgttatggggattattttgaggcatggaacagttactgcatggtggctcctatgccggaagaatggtatgatttgggcacggagctttgtgtacgcgtaaaagaggatcaagatcgcgattttatagcccgtttgaaagcggatagtgagaaactgtatcgcgtgggcaatgtgtttatcgcggatgtgcgttcttttaccgatatccgtcgtaactttcagcagtcacatacgaatgcctggaacagttaccttttcggaatgggtttcttgttgttgaatatattcttgggattgctaggtactttctggttccgtactcagcaacgacgtggtgagattgcattgatgaaatcattgggtggaacagatcatagtatctttgtccgtcagttggcagagggattgatattattggcggtggccacaattcctgcgatttttattgattggaatctggcaaatagtgaattgaatgcttggatgaatggcactactattgaaggtggacgtttcataataacagttcttatttcctttattttgattgcattgatgattgtagtaggcatttggattcccgcacgtaaggctatgaaagttcagccggcggaagcattgcataatgagtaatctcttttttgttaaaaggttttagagcatagcacaaacatgataaaactatatattaaacaggctttttaccaacttcgtgagaataggctcatcagcttggtttctatcataggaacggcattggctatttgtatgatcatggtcattgtcctggtgttggaagtacgcattacggattgtgtgcccgaggtgaaccgttcacgttctctttatatgaaagcgatgtctattcatcagaaaggagataccagtgataattcatcaaacggctgtatgtcactcacagtggctaaagagtgttttaaggcacttactgttcctgaggcggtaactatagtgtctacaggaggcaggatgcgtatttctgtacctgctggaaaaatgatgacagtggataaccttgaaactgacgataccttttggaaagtgttctcttttgattttattgccggaaagccgtttacggctgccgatagtgaaagcggacttcctaaggttgtacttagtgcttctgtggcccggaatttgtttggtacggtagaagcggtaggacgtacggtccaactcaacttggccgattatacggtagtgggtgttgtgaaagatgtatccaaactggctgtttcttcttatgcacagatttggatacctttcaattcaacagaaatagccaggaagtgctggtatgacaatgcgatgggaacttttcgtgtggtcattctggcacattcggagaaagattttcctgccatcagagaagaggcggaacgcctgcgtcagaaattcaatgacggattgcaggattccgaaattttttatcgtggacaacccgatgatcgtttctcttttatctttcgtcactggggaagagagttacaggcgaaggaagcttatttgcactacctgttggtgattgttattttattgctggtaccggctataaatttgagtagcatgactttgtcccgtatgcggaagcgtatgtcggaaataggggtgaggaaggcatttggtgctactgccaatgtcttgttgaggcaagtgttttatgaaaatttattattgacgctcatagccggagcagtaggaatgcttttcagttatgcatgtacttttttattgaatgatttcttattttccaatagcgagaaccgtgcccaaataggagaaaccagtctttcggcagatatgttgttcagtccctggatattcttggccgcattcattttctgcctgctcttgaatttgctgtcagcgtgcatccctgcctggagggcatcgcgcatgaatattacggacgctttaaaccaacgttagatcatgaacaggaatttattgaaacagatatggaacgagcgccgcagcaatgcgtttctgtggatggaactttttgtggtgtttgtcatattatggtatattgtggatgtggtatatgtcacgttgagcatctataatttgccgatgggctttgatatagaaaatacgtatgttcttcgttttgagcggatgacttcgaaggcggctgcttatcagcctggccgtactatgaaagaagatgttgccgatttgcatgaaattgtaaacaggcttgcgcatcgtccggatgtggaagcagtcagcctctcgcaaaactgtataccttataatgacggtgcaaacagtttttcattttatctggatacagtcccggtacgtagtttgaaacgatggataactccggagtattttaatgtattccgttaccgcaatatagacggttcgggtagtgaaagccttgctgaggcactgacaccgtccggcatggtcttatctgtgaatattgccgatgtttatcaggatgcaccttggcatggtaaggaacttttagggcgtagggtgcctgtttggcggaatgagccggaggcggagcatctttctatagctgctcttaccgagccggtccgttatgaccattttacagctccggatgattacggctcccgttatgctgctgtgtacctgacagatgaggcgttggaatccttaggtgagacggtttatatagaagtttgcctgcgtgttcgtgagggacagaatgatggattcatagaccgtttgatagtggatgccgaccgtcaatatcaggtgggcaatctatatcttttggatataactcctttgagtgatgtacgcacagcttatgaaacggattcggtgaatgagttgaatacgcaattttgtatcatatttttcttattgctgaatatctttctaggcattatcggaactttctggttccggacacagcatcggcgtgccgaaatagcgttgcgtatggctttaggatctacccgttggggaatctgcggtcgtctgatgggggaaggagtcttgttattgctgatatctgctattcctgcattggttgtggcgtggaatttgggatatgccgaactggtggaagttacacgtatgccttttacggcaggtcgttttgcgattacggttctgggcacttttattctgattgctggaatgattgtcattggaataggataccctgcccgtcgtgccatgagtatcgaaccggctgaggcattacatgaagaataaataaaatgaagagataaaacgaatgaaacagctattattacaagcatttaatctgatacggcagaatcctttttatgctacaatcagtattataggaacagctgtcactatcgcttttgttatggtagtagtgatgatttatgacttccgtacaatggatatggctccggaaagtgatcggagcgatatgatgtatacaggttcgggaatgacctatcgtaagctggatcataccaaccagaacagcggtatgggacgcaaggcttttgaagcattgttttcagagcttcctggtgtaaaagaggttacttggtatcgtggcgtttccaagaccccttgtaacttgtccgcttcgaatgagatattcaactattatgtgcggcctgtggctgataactggtttaagttctttgattatgaatttatagcgggacgttctttcacacaagaggagtatgatgcccgtcggtgggtcagtgtgataaccgagcgtatggccttgcagcttttcggcacgacggatgtggtaggaaaagaatatcaaagtaatttttttcctactaaagtggtaggcgtggtgaaagatgtcaatgctattttccagacagcatacgctgatgcttttgttcctttctcattggaaaatgaagactattatgctacttggacagggggcttgggaggaatccgtctgggattgctcaaactgctgccggatactcgtcctgcagaggtacggactgaagtacagcatcggcaggatcgtttgaatagttcaacggcagaatatgctttcgagatgaacgaactctatactcatacggaatacaccttttttcgtggaaaagatattagtgcaccgttggtttacagtatgttattgatggtcttgctgattgttcctgctattaatatctcaggtatgaccaatgcccgaatgcaggagcgtgtgacagaaattgcagttcgcaaggcgtatggcgcatcacgtatttccattatggtgaggttgtttttagagaatctgcttacggtctttttgggtggaattttaggatatctgttttcgtgtgttttggtttggctgggacgtgtatggttgtttggtagcggcgaggtagaattatcaggtatcagtctggatggaggtttgttgttgcatcctgctttatttgtgttggttttcggcgtatgtgttgtttttaatttattgtcggtattgattccggtatggatggtcacacatcgtaatattgcaactaccattaaaggagaataggaggaaaggaaaaatgataaagagtttattcagacaaatgtggaaccaaaggcacgctaatgtatgggtgtgggttgaattggttgttgttcttgtcttgctatggtacagcatcgatctggtttataattatgaggttgctgcccgtcagtctaaaggatatgacacggagaatgtttttgatattcaactgaatattaagccggctttgcaaaatgattctgtattaatgagtcattctgctgaatatttggagcaaatctatcatttgatccaacaatatcaaggggtggaggaagcttgtttttattatgggacaataccttatacgggaaataatatgtatgagggatatgctccgcattcggattcgactcatgtggtaggctgtttcatccgttatgtcagccctacttatttcaaggtatttcgcttgcagccattatcaggttcatttgaggcggagcgttgggacaagaatgaataccccatgccggtgttgatgagtgaaacgttaagcgattccttgtttagcggacgcaatggagtaggggaaacttgtttcaatccttatttcctgaatagtgtgcagccggaaactaattataaggtaatggcggtacttcctgctcataagaccgatgagtacgagcgttacgaaccttttatttatcttcccagttcgccgctgacttattggcatcacattgcggtgcgtgtggcttctaattccataccgggatttaccgaacgttttatgcaggatatgcaagggaaattatctatcggcccttattacttatacgatataaattcgtatggcgatatgaaggaagctttcgatatagagcaaggaacggtgaattatctgaatactacctatgccgttatccttttctttgttttcaatatatttttagggatgctgggtactttctggtttcggactcgtaaaaaccgaagtgagatagctttgcgtatggcactaggttgcagtaggatgaatgtatttggttattatgtacttgagggcatccttctcttggtttcggctgccattcccgctgtttttgtttgtgcgaatatgcagatggcggatcttactgtgcatacattaatggaacctgcttggggacgttttttgctttgttttgtgtcggccatgctgttgttggggataataattttgctcggcatttatttccccgcccggaaagcgatgaggattgagcctgcagacgcgttgcataatgaataatgttatttcattgtcacatgatcagcagtgttcgtatatgaatggagtgtccgatttcggacactccatttttgttgtaaggtgttataaaacagtgaaatagttttttggcataccatttgccttacctttgataaaaagaataataacgcaatgaaaaaacaagtaatatctctatttttagcctttggcatatcgttggttgccggagcgcagccacaagaaaagcgacgtgccatcactttggaggaagccattactattgcccgtgtgcaaagtgtagatgcggccgtagctttaaacgagctgaaaaccgcttattgggaatatcgtactttccgtgcggatttgcttccggaaatgaattttgaagccactattcccagctataataagaagtataattcttatcagcaggataacggtgcttatacatttgtacgtaataattatatggaaatgaatggtgaagtttctatcgatcagaatatttggttgaccggtggtaaactctcattgaatacctctcttgatttcttgaaacaactggatggagataaatcaaaacgatatatgtctgttcctgtggcattgactttggaacaacctattttcggagtgaatacaattaaatggaaccgccgcatcgaaccggtgagatacgctgaagctaaagccgcatttcttactgcaaccgaagaggtaaccatgactactatcaattattttttcaatttgttgctggccaaggaaaatgtaggcattgcccgacagaatctgaagaatgcagataaactgtatgaagtggctaaggcaaagcgtagcatggggcagatcagtgaaaatgatttgttgcaattggaactgaatgtattgaatgcccgttctacgttgactgaaaatgaaagcaacttgaaaagtaatatgttcaaactccgttcatttctggcattaggagaggatgaggaactggagccggttgttcccgaaacgattccgactgttttgctgaactatccggatgttttggacaaagcacttgccaataattcatttgcacataatattcgtcgccgccagttggaagcagattttgaagtggctaaggcgaaaggtaatttacgtgaaatcaagctctatgcacaggtaggttttacaggaacagacaatgaatttaatagtgcataccgccgtttgaaagacaaccagattgtggaagtcggttttaagattcctattcttgactggggaaaacgtcgtggtcaggtaaagatagctcaaagtaaccgcgatgtgaccgaaagcaagttacgtcaggaaaccatgaatttcaatcagaatctgtttatccttgtagaacagttcaataatcagcaggcccagttgcagatagcagacgatgcggacaagattgcccagaaacgttacagtaccaatgtggaaaccttcatggttggtaaaatctcgacattggatttgaatgactcccagacaaagaaagatgaggctcgtcagaagcatatcaatgagttgttctattattggtactattattaccagttgcgcagcttgacattgtgggatttcaataccaatactaatattgatgccgatttcgaaaagattatcaaacaataggatttttactattcaattctgtttgaatataaaatggggttgtctttgtacttattaaaataataatttctacatttgcagcagtatgatattaattatagacgatgacagtgccattcgttcttctctgagctttatgctgaaaagggcgaaatatgatgtgcaggccgtaccgggtcccaaagaggctattgaaatagtccgttcggttgcaccccagttaatcttgatggatatgaacttcaccctgtccaccagtggtgaagaaggattgacgcttttgaaacaggtcaaagtgttccggcccgatgttcccgttatattgatgacggcatggggaagtatccagcttgccgtgcaagggatgcaggcaggtgcattcgactttattaccaaaccttggaacaacgtagcgttgatgcaaaggatagaaactgctttggagctgacttcacaagataagaaagcagcggttccggtggaagataatgacggcttcaaccgtagccatatcattggaaagagtaaggcactgatggatgtgctggccacgatcaagcggatagcgcgtaccaacgcatcggtcttgattaccggtgaaagtggtacaggtaaggagttgatagccgaagcggtgcatttgaacagttcccgtagcaagaaaccttttgtgaaagtgaatttgggaggtatttctcatactttgttcgagagtgaaatgttcggtcataagaaaggtgcgtttacggatgccacagccgacagggtaggacgttttgaactggctgataagggtacgattttcttggatgagattggcgatttggatttaagctgtcaggtgaaactgcttcgcgtgttacaagagcagacttttgaagttttgggcgacagccgtccccgtaaagtcgatatccgtgtggtcagtgcgacgaatgccgatttacggcagatggtgcaggaacacaccttccgcgaggatttgttctatcgtattaatttaattacggtgcatcttccggcattacgcgaacgccgtgaggatattccgttattggtccgtcatttcgccgacaaacaatgtgaatcgaacggtcttcccaaagtggaatttacttctgaagcgatggattatttgagccgtttgccttatccgggtaatatccgtgaattaaagaatttggtggaacgtaccttgctggtcagtggaaaggaaatattgactgcggatgattttaaatcacaataccagcatcctatagaacagaagatgacaacgaatctgcaaggcatgaccttggaggagatagaaaagcagactattctgcaaacgcttgaaaagtataacaataatatgtcacaggttgccatagccttaggaatcagccgggccgctctttatcgccgtttggagaaatacaatatacaagtgaatgattagcaaaaacggaaccggataaaatatgaaactgaaattcttgttcttctttttagcattactgttgacagcagtatggactatcctgctcgttcttacattgaaggaacgcggtgcgctgttttatataggagagggagtcattacattcagtcttgtgtttctggtttatttctatcgcaaagtcgtgaaaccgcttgatatcatcggcaacggtatggaacttcttcgtgagcaggatttcagcagtaggctgactcctgtcggacaaaaggaagccgaccgcattgtgttggttttcaaccgcatgatggagcagttgaaagacgagcgtctccggttgcgtgagcagaatcattttcttgacttgctggtcagtgcttctcctatgggagttgtcatactgactctggacggacatatttccatgctgaatgcggcagctcttcgttttttggattattcttcgtcagaggaagtcagaggccgattgctgtgcgagttggcttcccctttggccgaagaaatagaacgtattcccaaagatactacggaaacaattcgtctgagcgactccatgatttaccgctgttcccggctttcttttgttgacagaggcttttctcatccgtttattctggtggaaagtctgacttccgaggtggtgaaagcagagaaaaaggcatacgaaaaagtgatccgtatgatagcacatgaggtgaataatacgactgcgggcattacctctactcttgatacggtggatggtgccttggaatgtatggaggatacggaagacttgcgcgaagtgatgaaagtctgcatagagcgttgctacagcatgagccgttttatcacgaatttcgccaatgtggtgaagattcccgagcctcaattacaatcagtggacttgaatgaccgcgtggccgcttgcaagacatttatggaaacggtttgccgtaaccgcaagattacgctgcatcttaatttatgtaaagagaatcccgaagtgatgatggatacttccttgtttgagcaagtattggtcaacattatcaagaatgcggctgaaagtatcggggaaacaggagatatctttatccgtacttccgtatcacctacgatgttggaaattgctgataccggtgccggtatcagtaaagaggtggaaaccaagctgttcagtcctttcttctccaccaagcctaacggacagggtatcggtcttatttttattcgtgaagttttgataaaacatgggtgtactttctctcttcgtacctatccggataaactgacccgtttccgtatccgtttctgaaaagtatgacgttcctgtttctaaccggtattagcaaattcaaccggatgacgatgaatctgtatgtatttcaccggttacctttcgagtatattgcattctgctgtttttttacaggaacataaatagctggaatgagaaatttattctcaattagcggggaaaaatgaaaatattcaaccaagattgggtgaaatcggttggttttggttatctttgcaatatcatgcactaaatacatcaaaatatgaaataccctatcggcatacaaactttcagccgcatccgcgaaaacggatatgtttatatagacaagactgccctcatccatcagttagtgagcagaggaagtatctattttctcagccgtccgcgccgtttcggcaaaagtttgatgatcagtacccttgaagcctattatgaagggcgaaaagagttgtttgaaggacttgccattgccggactggaaaaagactggtttcaatatccggtatttcatatagatttcaacggtgataactttgccaaagaaggagtgctggaagctgctattgaaggctatttgggaaattgggaagatatgtatggcaagaatcccaattacacaacaccgggaacccgttttatcgaattactgcgtcgcgccagcgaaaagacaggacggcgtgccgtggtgctcgttgacgaatatgacaaacccattctcgatgtgcttgatacccccttggaagaagagaaccggaatacgctgaaagctttttattctaccttcaagggagctgataaatatttgcagttcgtgatgctgacgggagtcaccaaattttcgcaagtcagtgtcttcagcggtttcaaccagcctaaagatatcagtatggacccgcgttatgaatcactgtgcggaatcacccaggaggaaatggagcgttatttccatgaacctatttccgagttggccgaaaaagacgaatgcacgtatgaggaaatgaaagaacgtctgaaagcacaatatgacggttatcacttcagtgaaaatatgcttgatatttataaccctttcagtattctgaacgcttttgattctttacaaatccgtgactactggttcgcctcgggcacgcctacctatctggtccggctgttgcagcatagcaacgagcagatcaatgaattggtggggcaatattatgacgcatccttgtttgccgattacaaagctgatgtggaacgccctcttcccatgatttaccagagtggatatcttactatcaaggattacgataaatatacccattcctatctgctggatttccccaatgatgaagtacgcagaggtttccttagcttgttggccagtgattatttcaaagtacagggagtttccgtttccagctggctgatcagttctgtccgtctgctgaatgcgggcaagacagctgctttccgcgattccctcacagctttcttgtccggtatcccatacgattcgcatgacagtaccaagactccggaactgaccgagaagcatttccagtacacattctatctcattctccgtcttataggggtatattgcctccgcattgaacagacacaaagccggggacgggtggactgcatactcgagactccgcaatatatttatatttttgaattcaaactggacggcagcgccgatgaagccttgcgtcagatagaagaaaaaggatatgcccaaccttatctggcggataagcgaaaaatagtttgtataggagtggtattttcttcacagacgcgaaccatttccgagtggaaagaggtgaggtaattttattttagtcatcgttatcagccaagatccacaacaaagttgggagcgacaaaaaaagtttttttcataaaagtccgtcacatccgtcacagttgttttcaacttgttgataaacagatgcttactagtgtgacggatagtgtgacagatgtgtgacggacttttatctgtcacacgatgtctgaatcatgtcaatgtgtatggaatctcagtagtatgtccggttttcaaagctatacagtcattggactttgctgcataattcactgtggaatagtgtgttccaccattaggaacaaatggctttccgcagtggaataacttgttccataagggcggaacaaatggttttgtccggttggaataaatagttcctcactgtggaataaattattccatattgatgaaacaagctgttccaaccggtggaactttctattccactgtaagcctgagacttcgggatgtagtttgacactgtctgttgactactctttaaccttacttctaaggatgattggcagagtacctttttatctgtatgttgtgacagataaaaagtccgtcacctatctgtcacactatccgtcacacctgtaagttcctgtttattaataagtttaagcttgctgtgacagatgtgacagacttttatagaaaaacttctttgttactccctactaaaaaaagctcctgttctttccctaaaaggccgttatcttttctgaaaagctcttgatcttttgaaaaaacgtccttgtcttttgaggtggaattctggatctttcggccatgatttcacatacgtacgcattcatagtcctgtacgtatgtgtggctccctgcgggatgtacgtaaaaaagcgtgctttctggtacgagataagacactatgtgcacaaatttattgtaaaaatgatgtggcggattacaaaaaagaaattcatgggtacaaaaaatgggaattattttctattctatttataattccgtatctttgccgtgttttccatgctgatacttccgtaagggaggtatgggagagtggaaaatacatatatatagaaaagacgtttacttggcgttttgttcttggcactttgaaacttcgcaaatttctaaccctgccacaaacaaagcaacagtaggtgtctgcgcgatatgttaatgttcttgtttcatctttgctggtcaaagaggtattcaagttgtacatatcggcgtgggcttctgcgttgctcgttcggacagggtgggcaatgcgaaggcctcaaagtgcaggatgagtaacaggtacagattcccgcgctttttctttatatacgtatcacaatttctgatttaacacataagaaccatccggttcgggaatctgcggaaggtcaaagttggcccgatatgctgcatcaattaataatgtagattccatatctcctatcatgaaatagctttccggccgaccttcataaaaaagaagtcaaaacttcttgtattatccgaaagggtaatgtaactgattgaagtacagaaagatatacgtacgtcaaagccccaagagtatgttttgttgtgaaaaaacacaatggtttgccatgcgggtcacttaccgtcgtgaactggatgtgaagaatctgctggaccaacaaggggtatccagtttcattcccatgcattatgttatccgcatggcaaagaaacgtaaggtgcgcgagctggtcccagtagttcataatcttatctttatccatatcacacagactgatatgaaggaattgaaaaaagatattccttatcttcagtatatgactgactcgcgtagcggtgagaaaatcattgtgcccgatgggcaaatgagggacttcatagccgttgcaggcacgtatgacgagcatctgctttttttcaaaccggaggaaatcaatccggctaaaggaacacgggtgcgcatcatcgggggagactttgcggggtatgaaggtatctttataaaggtgaaaggggcaagagaccgcagggtggtcatttgcattcagggaatcattgccatggctatggcaactatttcgccggatttgattgaagtgattaaagaacctaaaaagaaatgatggtatttgtcttgcttgaattacttttcctatttaaatcctttgtcatgctgtacaaagtgagtcatctgataatatttactttatataactatgaatgaagtggttccttctggtgtactccttcaacggcttatccaaaacagccacactgatatactgaatagggaaaagaataatgaccggtttatgcacctatatcatataggtacgtattgggtggcatttgagcgttccgcctgtagattgtgcggtctgtttccgaaaagtgaactttctttgttttgtgttccaggttgtccggagtatgtggtgatggcttctgtgcctgttgatgaggttgaggggtgttttcgcaaacatgttgttttgtgtgatggtgtttatcataaaattttgtctgataatttgttggcggcaagggattactataggtggcatgatatggcggtaaggatggtgtttttataaaaaaaatatcatataaataattaatcaaaaatgttaaatttcttttataggagtgtagcaaaatctgaaatgaatttattagctatcaaaaatagaatagatatttatttaaaaaaaggcaatgagagaaatgttcttgccaagagaaatattatagcttcttttggaataaaaattataggtattattatctctttgatattagtgcctatgacagttaattatgtatcttctgctcagtatggtttatggctaactattagttcgattgttgcctggattagttattttgattttggctttgctcatggatttagaaaccgttttacggaagcaatggctttaaatgatagggaattagctaaacaatatgtcagcacgacttatgctgtcttgactataatattcgttactatggcatttgtcgttcttgttattaatagttttttggattggagttcattacttaatgttggtttagaatatggtcatgaattgcgtttagtttttgctgtactgactataacactctgtttgaatatgattgcaagtgtgttaccaacgatgctaaccgcagaccaaagaccggtttattcatctttatttatagttattggacaaattatgtctttaattgtaattggtatcttaattagggtaactgctggtcgtttattatatttagcttttgctttatctgtcattccattattagtcttatttgtagcttcttttttcgttttttcttcaaaaagatactgtgatgtagctccaagtatgaatacaataaattgggctttaacaaaaaaaatcataggattgggtgcacagttttttattattatggtatgtatgttatttatatttcaagtgataaatataattattgttcgtgtttgtggacctgaaaacgtgacggcatataatattgcatataaatattttaatattcttaatatggctatgatgattatagtaactcctttttggtctgcatgtgctgacgcgtatactaaaaaagattttttgtggatgaaaaacgtaatagagaaaatggagatgatttggaaactaagtatctgtgtattaataataatgattcttgtatccagtactttttatgatatatgggtcggagatagtgttaaaatatcattatctctatcagtaatggtaggtgtttatattttagtacagaatttatgtggaatatatatatatatgataaatggaacaagcaaaatccgattgcagttggtcgtctatttggtatctgcttttatttctgttccgacaatgtactttttgtgttctaaatatggaataactgtgatgttattagtgcctatcagtgtttgtttgattcaagcatttgtagctaaaaaacaattaaccaaaattattagaggaactgcttctggaatttggattaaataaaaacaaatagtcttttatatggaatatatactattactaacagcttgtattaatcctgatggtatgccatttacttgtttggcagatgtaggagtgagaaagaaacaatacatcgaggctttgaatttttacctaaaaaacacaacgagaaaaattgtatttgttgaaaattcaggaactgatatctcatcttcgtttaaagatttccagcatagaattgaatttttgtgttttgatggcaatctatgttttgataagagaaaagggaaagggtatggagaggcgcttatattggaatatgcaatggccaaatctgaatttattactgatgatgtgttgatttttaagttgacagggaggttacaattgattaatataaatcgattgatacattatatggataaactaagtccaagtaagaattttgtttgtgttgtcccaccccaaaacaattcggtagattcacgatgttttgtctgtaacaaatactatttggagaatatctttctaaaagataaatttcatatagatgattcagtaggatattactttgaacacttgttatttgattctttacgtcagaataaagggaaaataagaattcataagataccctttttcttatattggagagggatatctggaagtttgggagataggttaatagaacctaaatgcagatattggtctgattttaaggcattgtaccattgtatgatttctaaattataggtgatgaaacgtttcttatttatgtatacttcttttggagggcatgtcctagagtattttattcatatatatcattatgcgatagatgatgaaaagaatacctattattttattttctcgccggattttaaaaaacatattgaatgtgagcaattagtgcttaagaaaaatattatactgcgatatctgacagttagggaattagaaagattgcatcatactaaaaaaatattaaagtcatattgggggaatagattattaaatgaaaagatacggaagtacgatataacagatgtaataatgtgctcttatgattgtttagaccctctttttgcttttatgacgatgaaaaaagtttcctatattggcatatattattatatttatttatatgaatgggctgacttatctataaagcaaagaatcttaaagtcaattatattttggaagatggctcataacaagtcaatcaagaaaatatgtatttgtaatgattcatcttctgctgcattttttaatcgtaaatatcagacaatgaagtttgatcgtatatctgatccttatgtttccattacactaactttgccggattttagaaaagataatgctgtaaaagaagatgctattgtgctttctcatattggagtcttatctgaaagaaaaggaacacttaacatattgaaagcgataaaagaaatgtctgttgttgatagaaatcaatttgtctttgtttttgcaggaaaaatagatttggatataaaggatgagttttatagactggcagcagaatgtagtgagaaatatcggctgataataaaggattatttttgttcttatgaggaaatatctgctatatgtaaatcatcgaatgtccttttaattccttatttgaataattcacaaagtagtggagtattaggatatgcagcacagtttaatgttccagttttttctcctagctcaaatatgttgggtaaaatagttcggaaatcgaaattaggatatataagtagtgatgtggaaatattgggtattaaaacttttttagagtcttgcctgctaaacaagcttatgaccatagatggtcaagagtatttgaaactaaatacagtgaattcttttttgaatacattgttaaactgattatttgtaaatatgaatattgtatttttattgcgactttggcctatttatggaggaggtgaaacagtaactatttgtttagctaatgagatggcgaagagagggcatgctgttacagtcttttattttaaggattctgaaacaaatgaattgccctatattgatccttctatcaaggcggtaagaataccggatgtgaggtgtgatgaatatacttatgatagtgatgatggtattaagattactatcgctttaaaattgtatcagcagaatagttttgattttataatcaatcaatggtggcctgttgtttttttatctccattacgaagtttttttaatgcgaaaataatttctgttcatcatacggctctttatactcgtagtgtgatagaaggtttttgtttgaaatcaattttgaagcgtgtcttttttctgctataccgtttctttgaaaaagaaagacaattatctgttatagataaattgttaatctttagtgataaagtattatttctttcgcctcagtttaaagaccaatatatacaattgagaaatccaaaatcggttgaaaaattggactggtgttataatcctttggtttttgataattttatttctatggatgaaatttgtaaaaagaggaaagaggttttatttgttggaagattgttagaatcaaataaaaaaatatcgaaattattgacgatatggaagcatattcaattagataaagaatttaatgaatggcatttatatattgtaggtgatggtaaggataaatccttttacttagattttacacgcaataataatattcccaatgttcattttgaggggaggcgatatcctataccttattataagcgagcttctatttttgctatgacatctgcatttgaaggatttccaatgtcgataattgaggcgcagcaaaatggggtagttccgattgttatggattcatttttgtctgtgcatgatattattgataatgatgtaaatggtgtgttgatttcttatggtaatactactatgtttgcagaatctttaaagtctttgatgaaagatgaaatgcgaagaaataaattagcaataaaggggctagaaacttgcagacgttttaatatcgaaactgtggtagataggtgggaggaaatatttgaaaaaatgagatgatggaacttttattatatctatatattctaattgttgtttatctattttttaaatattctagaataagaacattatatattttctctccatatatattaatctatttgaactttatctttaatgatgctattccatttctatttttttatccagatgttccagagaatattcagtatacgacatttacagcagcaattataaacctttcgtttctatttctatttagaaagcaggcacaagtcccaatatcaataaatcttccattgtcgtctattgaattaaataagaaacgaaagatactactttcttgttttgtgttttttttattgtgggctggagtaatgtctggagtattaattaatttgttaagggggaataatatagaagatttaagaagaactagtgaaataggagttggggttattagggatattccaatgctagggatacaaataataatgcttgttctttttctccaaaagacatggaagtgttattataaagtcgttgctttttattctttttgtttgagcgttttcttatttttgacaacaggaaataaaggaggggttcttgttggggttacattatttttactgttttttcatttgaagaaaagaggttttaagtggtatgaatatgtcttatattatttagctatgccattagcagccggtacattacaaggcattagaggtggagacttaactcttatagcatcccaaattgcagtattcttttcttatccagtaattctttatcaagctaattctattcctatcatgaatgcggttggtacggagaacttcttttggggagaggaatattatactggtcttgtaaaattcataccccgttttttgtggccggataagcctttgtcatttgattataaattaaaagaattagcaaactatgattttgaaggtgggggaatttatacgactttatgtaatgatttatatataaattttggatattactattttatcttctatatcttgtggctattatttattcattatttatatggaatggtaatggatgataaaaggttctattatagccgtattatagctttattcatcatacttatgggggggattgcatctactattggctcttgtgaaatcttactattatttctcttgttcttaatattatattattcaagagtgaaaacattatagattgtaatgaagaagaaaatattatttgttgcttctgaatttgcttcgggaatgattccttttgctgctactgctataaatgctttagctaaggatgatagatttgaagtacactgtctttgtgttaattcaggtatttattcttataggaatataattttacaagaagcgaaccctgttttcttggaatacccaaagagtaaaatgatgaaattgttttataaactatggcctctagagataataaaacatttatcgcaattggaaaaaagtattaatccggatgctgttcattttttgacaggtgattttacattagctttgtatatttgtttgaataataaaagaacattttactacacagtgcatgatttgcatccacatgaggtggtaagaaaaactttattgggttatttgatgcaaaaatatattatatggggatataaattatgtaggaatataattcctaatcttacgacttcctcttatttccaattgaaggaactgaaagaaatatatccatgtaagaaagtgaaatacacttcatttccttctctaattacatcattgataataaatggtaaaaaaatgccattagaagtaagtggcttaaaagaatatattttgttttttggaacagtagataaatataaaggggttgatttgctggttgatgcgtattgcaatttaacatgtaagtcactaaaattagtgattgcaggtagaggctttgatattgaaactcataatgaaaacattattcgaataaatcgttttatagaagatgaagaagtcgcatatctttttaaaaaggcaaaatttattgtttatccttatcgttctgcaacaatgtcaggggtattgtctttagcatattactttaataaaaaagtattagcctctacaattcctttctttgaagataatgcaactttaaatgttgtgttatttaaagttaatgatatagatgatttggaaagaaagatgaaatctttaatatttggtaaaaatttgagtgtagatccaacaagctatcttaatatatatggtgaaggtacattaataaatagttattgggggttatatgaagattgaaaatattaaaataatttatacataatgataaaatattgattcttctgtgataatgaaaatcttactctcgaataaattctattaccgccgtggcggcgactgtgtctgtaccataaaccttgaggaattgttgaagcggaaaggtcatgaagtggcaatcttcgccatgcagtatcctgataatatagaaacaccatggagcaagtactttcctggtgaagtaaagttcaagccgggattaggtatgcttgaggcgttgttacgcccctttggtacgaatgaagtaaaacgtaaatttacggcattattggatgacttttgtcctgatattgttcatctgaataatattcattctcaactatctccggttattgcagaaattgcgcatcaaaaaggaataaaagtaatatggacattgcatgattacaagctgctttgtccgcgttatgactgtttgcgtaatggagatactatatgcgaagaatgtttttcggataagcgtaaagtcttggaatataaatgtatgaagcattcacgcttggcaagttatttatcgtattgggagtctatgaagtggaatcgtgaacgattggaagtttgcacggatatctttatttgccctagtcggtttatggcagagaagatgcgacaagggggattcgatagtaaaaaaataaaaacagtatgtaattttattgatactgagaaatgttatggtaaggattataccaaaaggggaaattattactgtttcatagggagattgagtcctgaaaaaggagtaaggaccttgatagaggcggcaaatgctctaccatataaattggtggtgattggaggggggcccttgctggaggagttaaagatcgtagctgggaataacgtggaatttgttggctttaaacaatggaatgatataaaggagttagtgggaagagcacgtttttcagtgataccttcggagtggtatgagaataatcctttgtctgtgatagaggcgcaatgtttgggtacacctgtactgggagcacgcatcggaggaatccctgaactgatagaagagggtgttaccggcatgacatttgagagtcgtaataaagaggatctgagaatgaagattgaaagtatgatgcaacatcctctcaattatgaaatgatagcaggaaagggacaggaactgtatggtgcagaaatgtattatcaacagattatgaatttgtatcagggttgatttgttgctttatagtatataatggaaagaaaagacagggaaatattggataattcatttattactagtatttttgtatcatcaagaaatatcggatggctattaagaattttaaaaccaaggaagaggcgttggctgctatgaagaaggcgacagaccgcaaacgcacgttgatagaatatctcaaaaaggggtattccttagaagaattggaaaaaatgggatttaaaatggcaaaatttgcatgatgtgatagatttgccaatagaacgtgtcaatgctttatctccctataaagtttatataaataataatggtagtttaggatttgaaacccaatatggttctgtctatgaggtagggtttgttgaggactatacttttatggatgagaatgcgtttcagttttttattttggaatcacaaggtaagcattctgtaaaagatccgttggtcagggaaactatttgggtaattcttgaaacattctttttagaaaacaatcctgttatattatatatttgtgatatgtcggatggtaaacaggctattcgtaaccgtttgttttccatgtggtattatgaatatgaacaacgggaaagttttacttttttgtccactaaagtggaagtagaatctactgattactatgcatctgttctcgttaaaaattccaatcctcaattggaagatataaaggttgcttttaactctttcattgaaaatatgaaagaaaaattggaatagtgaataattaaatcaaacaacttatggttaacaaatgttccttgcatcccaccgatgcaagcataatccttacatatcgttgccctatgaagtgcaagatgtgtaatatatggtttaaccccactaacaagagtgaagaaataaaagcaagtgacctgaagtcattgcctaagttgaaattcatcaatctgacgggaggtgagcctttcattcgtgaagatttgccggaaatagtggaggaatgttacaagcatacagaccggattgtgatttctacaagcggatggtttgaggacagggtgattgccttggcgaaacagttccctatcatcggaattcgaatcagtattgagggtttgagttgtaaaaacgacgaactacgcggacatgccggagggtttgataaaggactccgtacattgttggcattgaaagagatgggcttgaaggatatcggtttcggctgtaccgtgtcgaataataattcaaaggatatgctttcattgtatcagctcagcaagtcactgggaatggaatttgctacagccgcctttcataactcgtactactttcataaggacgacaatgtcatcaccaacaagaacgaggtgtgcggtgactttgagcaactgatagaatggcagttgaaggagaatcacccgaagagttggtttcgtgcttggttcaatatgggactgataaattatattgaagggggaaggcgcatgctgccttgtgaggcgggaagtgctaatttctttatagacccgtttggtgatgtgtttccctgtaacggtctggaagagaaatattggaagaagtcgatggggaatattcatgaaactccggactttatgactatttggacaagcaaaaaggcggaggaagtacgtgccatggtgcgtaaatgcccgaaaaattgctggatggtgggcacagcctctccggtgatgcataaatatataaaatatccgttgaagtgggcgttgcagaataaacttcgttccatgcagggaaaaacagtctgtctggataaaaaatggtgcgatgtagggcaagatccctgccagggagatttaagggaaaagttctagtattctaacttactttttcttttttcctgtaatcatcagccaaagtgccgaaaggcatgacagaatgatgattccggcatattgcagtacttcttttatgaaattgaatattttcattggctgattgacatttaatgtcgcaaatctactgtttttattttaaactgctttattctttatgaagattattgtgaccggtacccgtggcattcccgatgtgatgggtggtgtggaaacgcattgtgaggagctttttccgcgtatcgcaaggaggggggaggatgtgacggttatccgccggaagaattatgtgcatgacgggttgacggaatggaacggtgtgaaactgatagatatagaatctcctaaacagaaatcgtttgaagcgattgttcatacgttcaaggcggtgaataaggcaaaacagttgggggcggatgtattgcatatccatgccatcggaccggcattgcttgtaccgtatgctaaaatgttgggactgaaagtggtgtttacccaccatgggccggactatgatcgtgacaaatgggggattatggccaaaatggttttgaaatggggagagcggatgggatgcctgtttgcggatgaggtaatagtcatcagtgaggtgatccgcaatctgatcagacggaaatatggtagaaccgagcaggttcatctgatttataatggtgtgccttgtcccgattatacgaactgtcctgagtattttagggaattggggataactgaaagaaactacatattgggtatgtgccgttttgtacccgaaaagaatcttcatcatttggtggaggcttttcggagggtggataaaaaaggatgtcggctggtgttagccggagatacggattttgaggatgaatattcgcgtgcattgaaaagggaagcgagggaaaacggggtgatactgaccggattcgtgaaagggaaaaaactacattcacttttgacaaacgcccgttgttatgtgttgccttcgtcgcatgaggggcttcctatcgctctgttggaagccatgagttaccggttgcctgtcattgtgagtgatattcccgccaataaagaaatggggctggatgccagctgttattttgaaaccggtaatatagagcagctggctgatagattacaggaaataatagatggggattttaaacaggtacattacgatatggaaaagtatggatgggatggaatagctctccgggtggctgatgtttatgaaaatctgaaaaaatgagaacactttcattggtcgggctgatggtgcttctgttgtgtccgtctgctttgagagcccagtttgtgtatggaacgacaggtttgcttcacatgccgacaggggagatgcagcgtgacaagacttttatgtttggctgcgcttttctggatacggaagcgacaccggggcattggagttatgatacgggtaattattttattaatataaccatttttccttggttggaagtaggatatacctgtactttgcataaggctccttatggcagtacgtattatccggaatcagtctggggcaaatattgcaatcaggatcgtcaattctcgggcaggttgcgcctttggaaagaaggctggtggaaggaatggactcctcagattgtgttaggagcgaacgatcccggtaccaatgacaggacttctgaaaaggattatggtatcggtatgactggtagtgcatccggaaacggtcattggcagcggtattatctggctgttacaaaacatctgtctattagaaatacaggagagttaggtatccatttggcatacgtctataacaaacggacagattatcatttgaatggtcctgccataggtgctaatttccgctttcaattactcggcaatcagcctttgatgaaagccgttaataaactgaaccttatggctgaatatgacgcccgtacaatgaatataggtgctgaatacagcttttggaaagattatatcaatgtcgtgatagagttcaaccgctgccgttacttttccggcggagtgttttttaaagtctacctgaaataataaaaggagtggctgtcagtctttgattttctttttatacacttcccctctgctcattacttccttaacgaaattgtaggtttccacccctcggaagtatccattcttacaaaccggatcattgaaatattcttcattacttttaagcagaatatagttatctacgctgttgtcccatacatatttattcttgccgtatttttcagccagtgctatggcatccagtacgtgtcctattccggcgttataagccgccaagacaaatttcatccgttcgttttcatcttttattgcgttgaaagaacgggaagtggcagcaatatatttcacggcggcctttatactctcttccggattctgttctttaccgggaggaactcccatagcacgcgccgtccggggcatgagctgcattaatcctttcgcgcctgcccatgatacggctgttgtatcaaagtttgattccgtataggccagggaagctaaaatacgccaatcccaatctatatctttggcatatttcttgaatagagtgtcgaagtgtgaaatctttccgtctttgatggacaagatggaaccgtgaggtgtccgtttgcttatttcaaaataacgcttgctactggcctgataggcaggagaagtcatattttcctgatgccatttagtagcagcttcacctagtagcggtgaggtcttacgtacggcccatgaggcacgttggtcaaaactgacagccaggtcaatattcagattggggtaataagtcttgtttaatttggcaaggtcgttatcacagatggcataatctatctcaccattggaaacctgcatgattaaatcctcggtggtgatgctgtcattatcgacttcgtgtatcaatataccgccacccagttctttatccagattgatgagacgttccagatactttcctggttttacatagacctctttcccgattaattctgtcacattattcagtgctttcttctttttttgagtattacgttgtaccaatacctgatgggtgatgatatcttccccgcaaaactctacactgtctttgaactctttggtgacaggcagattataggctatcaggtctccttctccttgtaatagtttatgaaccaggtcacgtgcattctgtgctacttttattttcagttttacgtccaatgaacgggcaaactgatcggccagctcatactggaatcccataggctcgccccgatagtcgaaataagaagtggaactgttcagtgtcaggactactaattctccgctgtcttttatttgcggcaaatcataatttgtcacttcggcagattgttgccggttacggcacgctgtcatgcatatacaggcaagaactaatagccagacatttttcatcttcctaaaatcttttcaatatatagtttaaggatttcaatggccttttggttgttgcctccattggggataataatatcggcatattgcttggtaggctctatgaattcgtcatgcatcggtttcagaatgttccggtatttgtctatcagcatttccaagggatggccgcgttccaccatgtcgcgggtaatcacacgcagcaaacgttcgtcgggttcggcatccacaaaaatctttaagtccatcaagtctcgtaactctttatcatagagactcatgataccttccacaatgatgacttcctttggctctacacgaactgtttcgggcaggcgtgtacatactagataagaataggtgggctgctcaatgggatgcccttggcgcaggtcggcaatctgttgttcaaagagcggccagtcaaaagcatcgggatggtcgaaattggtttgtttacgtatttccaagggaatggatgactgatcgttataatatgagtcttgtggaatgactgcaacggaacctgggggcaggctctctatgatttttctaactacagtggtctttcctgaaccggttccgccggctataccaataattatcataataatagaatgtattttaaaacaaaactgttacttttgcatcaggttaaatactttagccctgtgtcgattacaaaagtaggataattaattaaaatatcaagtatggttaagcacattgttttatttaaattgaaagaaactctttcacaggaagaaaaattgaaagtgatgaatgattttaaagcggctattgaagctttgccggccaagataggttttatccgtcatatatttgtgggactgaatgccaattctgctgaaaaatgggatatttgtctggatagtgaattcgatacgctggcagatgtcaatgcctatgccgttcatccggatcatgtagctgcagccggccttttgaaggaggttaaggctgatcgtgcttgtgtggattatgaattctaaaagatagcctatgaaaaagataatcaatccctggaaagggatggaaggatataattgctttggctgtgctcccaacaatgaagccggagtgaagatggaattttatgaggatggggatgaggtaattagtatatggaaacctcagccacagtttcagggatggattgatacgttgcatggcggtattcaggcggtgctgctggatgagatttgtgcatgggtggttttgcgtaaactacagactaccggtgttacgtccaaaatggaaacccgctatatgaaacctgttaataccaacgattcgcatatcgtattgaaggcttccataaaggagaggaagcgcaatatcgtatttgtagaagcggctatttataataataaggaggaactttgcaccaaggcgctgtgcacttatttcactttttctcaagagaaggcaaaggaagaaatgcatttcttgaactgcgaggtggagcaagatgagataatacctttaatttgaaagaaaaaataaagtttttgcgataattatttgctgatattaaatataaactttatttttgtcgcaagtaaaaagaaaagactatggttagaactgctacacatcatcatcattttcctaacgaataattcggtgggctaaggtgatattgtagtataatgatatagggcttgccgaaaacggtaagccctttttattgccggttaataattaaaaacagatagaatcatgcttagaattgcagtacagtcaaaaggccgtttgtttgaagagacaatggcattattacaagaggcagatattaaaatctccacttctaaaagaattcttttagtacagtcgtctaattttccgatcgaagttctttttcttcgcgatgatgatattcctcagtcggtggctggtggagtggctgatttagggatcgtaggcgagaatgagtttgtagagagaaaagaggacgctgaggtgattaaacgtttggggttcagcaagtgccgtttgtcattggctatacctaaagatgtggactatccgggtttgtcttggtttgaaggacgtaagattgcgacttcttatcccggcattttgaaagatttcatggatcggaatggcattcattctgatattcatgtcattaccggttcggtagagattgctccgggaatcagtttggctgatgctatttttgatattgtcagttcgggatctactttggtaagcaatagcttgaaggaagtggaagtggttatgaaaagtgaggcgttgctgataggcaataagaatatgtctgaggagaagaaagagattctgaacgaactcttgttccgtattgaagcggtgaaagctgccgaagacaagaaatatgtcttgatgaatgctccgacagagcgtttgaaagaaattatcgaagtgctgccgggtatgaagagtcctactgtgatgccattggcacaagaaggatggagttcggtacatacagtgcttgacgagaaacgtttttgggagatcatcggaaaactgaaagcattgggcgcggaaggtattttggtattgcccattgagaaaatgatattatagccggtccatacgtcaggcgagatttgtaaacttataaaagaatacatgtatgaagaaaataatatatcctgaaaagaaagactggatggaaattctccgtcgtccggcattgaatacagacacgctgcgcaatacggttaaagaagtgctggataaagtgaagacggaaggagataaagcggtgagggaatatgaagaacgttttgataaggtgaaactggactcactgggggttactgaaacggaaattgctgaagcggaaaaggaggtacccattgaattgaaggcagctatcatgctggcacagaaaaatattcatacttttcatagttctcagcggtttgaagggaaaaaggtgcagaccgtacccggggtaacttgttggcagaaggcggttgctattgaaaaggtgggcttgtatattcccggaggcacggcgcctttattttctaccgtattgatgttggctactccggcacagattgcaggttgcaaggaaatcgtactttgtactcctcctgataaagaaggaaaggttcatcctgctatcttgtatgcggcaaaattggccggggtaaataaaatattcaaagcaggaggggtgcaggccatcgctgctatggcatacggaacggaaagtgtgcctaaggtttataaaattttcggtccgggtaaccaatatgtaacggctgccaagcagcaggtttctttgcgggatgttgcgatagatatgcctgccggtccttctgaagtcgaagtgttggccgacgagacggctaatcctgtatttgtggcagccgatttgctttcacaggcggaacatggagttgatagtcaggccatgctgataactacttctgagaaattaatgaaggaggtggagtatgaggtacaacgccagttggctttgcttcccagatgggaaatagccgaaaagtcgttggcaagcagcaaattgattttggtgagggatatggatgaggcaattgctctgacgaatgaatatgctcccgagcatttgattatcgagaccagggattatatggaacaggcagagcgtattgtcaatgccggatctgtatttctaggttcacttactccggagagtgccggtgattatgcatccggaaccaatcatactttacctaccaatggttatgccaaagcgtatagtggggtgagtctggatagttttatccgtaaaatcacttttcaggagattaatggcgagggtattcagaatatcggtcctgctattgaggtgatggcggctaatgaacaactgggtgcgcataagaatgcagtaaccgtaagattaaaaacagtataaagatgaaagatttgaaagaattgacgcgcccgaatatttgggctttgaaaccctattcatcggcacgtgacgaatataatggagcggaggcatctgtttttctggatgccaatgagaacccgtacaatacacctaataaccgttatcctgatcctatgcagcgggaattgaagaatatgatagctcctattaaaaaggtagaccccgatacgatctttctgggaaacggcagtgatgaggctattgacttggtgtatcgcgcgttctgtattccgggggtggataatgtagtggctattgaccctacttatggtatgtatcaggtgtgtgctgatgtcaacgatgtagaatatcgcaaggtgttattggatgaaaactatcagttcagtgccgataaactattggcggcaacagacgatcacaccaaactggtttttctttgctcgcccaataatcctaccggtaataacctggatcgtagggaaatggaaaaattactggatacttttcagggattggtgattatagacgaggcctattccgatttttctgatgcgccgtctttccttgccgatttagataaatatcctaatttgattgtctttcagactttttctaaggcatggggatgtgctgccattcgtttgggcatggcctttgcgtctaaagaaatcatctctattttcagtaagattaaatatccgtataatgtgaatctgctgacacagaaagaggctgttatgatgttgcaccggcattatgaggtagaacgttgggtaaagtcgttattggaagaacggacgcgtttggtcaatgaatttgtagaactgccttgttgtgagaaaatctatcctacggatgccaatttctttctagctaaagtgacagatgccaagaaaatatataattatttggtaggtaaaggtatcatagtgcgtaaccgtaccagtatttctttatgtcgtgattgtttgcgtgtgaccattggtacacgtccggagaatgatatgttgttggaagcattgaagaattatgaatgttgaagtatgaagaaagcgttgtttatagatcgtgacggtacgttggttatagagccaccgattgactaccaattggattctttccataaattggagttttatcctaaggtttttcgtaatttgggatttatccgcagcaaactcgactttgaatttgtgatggttaccaatcaagacggcctcggtacttcttcttttcctgaggataccttttggccggtgcacaacctggtgttgaagacattggagggggaaggcatcatttttgatgatatcttgatagaccgcagttttccggaagaccatgtgtctacccgtaagcctggaacaggaatgatgggaaaatatcttaccggtgattatgatttggctaacagttttgttattggtgatcgtgctacagatgtggaactggctagaaatatgggctgtaaggctattttgttgcaagaaaatatggatattctgaaggaaaagaatttggaatcctactgtgtattggcgactacggattgggataaggtcgctgaattcctttttgccggagaacgtatagcggaggtccgtcgtactacgaaggaaacggatatttatatcagcttaaatttagatggcagcggaaaatgtgatatttccacaggtattggtttttttgatcacatgttggaacagattggaaagcatggtggtattgacctgaccattaaagtaaaaggtgatttggaagtggatgaacatcatactattgaagataccgccattgctttgggtgaatgtatttatcgggcattgggcagcaagcgtggcattgagcgttacggatattgcttgcccatggatgattgtctttgtcgggtagctttggattttggcggtagagcatggttggtatgggatgctgagtttcatcgggagaaaataggggagatgcctaccgagatgtttcttcatttttttaaatcattgagtgatgcagctcgtatgaatttaaatatcaaagccgaggggcagaatgagcatcataaaatagaaggtattttcaaagctttggctcgtgccataaagatggctgtgcgaagagatatttaccattttgaagtaccctcaagcaagggatgtatttaagtcggcttcaaagacaaagtaacttaacttagttgggcgagtaagttaagttactttgtctttgaagccgacttacttttttatgtggtttatagctcttcgcattctttcagccatgaagctgcactggcatcgctcggcatacgccagtctcctcggggactgagtgatacagatcccactttgggaccatcgggcagacaagagcgtttgaattgttgttgaaagaaacggcggcagaatatagtaagccattttttgattgtttcctcatcgtatgtatcacgaaaagcgatacttgccaggaagaatatcttggcgggacgaaaaccgaaacgtaggaattgataaaggaagaaatcatgcagttcgtatggtcctaccaaatcttctgtcttttgttttatattgccgttttcatcagcaggaatcagttcgggactgataggagtgtctacaatatcgagcagggtaatacgtgattcattatccatgccattcaaagccacccaatttaccaggtatttgaccagtgttttgggaatgcttccattgactccgtacatagacatatggtcgccattgtaggtggcccagcctagggcaagttctgaaaggtctcccgtaccaatgacaagaccgcccaattggttggcaacatccatcagaatttgagtccgttcgcgtgcctggctgttttcgtaggttacatcgtgtacggtcatgtcgtggtttatatcgttaaagtgttggatgcaggattcctttatgctgatttctttaatggtaacacctagtgaagccatcagatggagagcattgttataagtacggtcggtagtaccgaaaccaggcatggtgatgccgatgataccttttcgtggcagatccaatttatcgaaagtcttggcacagaccaaaagtgccaaggtggaatccagaccaccggaaataccgactactacagtcttgcagtgagtgtgtaccagacgtttggctagtcctgctatttggatagcgaagatttcttcacagcgttcatccaattctttgccttgaggaacaaaaggatgagcttctatactgcgcgtcagactaagatcgcgtgtgttgacaaattctgtactgatgtggatggcgggacgtcccgggcagttgccgatattggcggcaaaagtggtattggtcaaccgttcaccacgaagacgctccacgtctatttcactgatgaccaattgttccttgaatgagaaacgttcagactcggcaagtaacgtgccgttttcatatatcagtccgttgcctgcaaaaacaacgtctgtggttgattcgccgaaaccggatgaactgaatacatatcctgccagacagcgtgctgattgttgactgactaatgaacggacataattatgcttgcttattccttcattgtcggcagacatgttgaaaatgatttccgctcctttcagtgctaatgcggaactgggcggaatgggggcccacatgtcttcgcagatttcaatgccaaagcaagtttccggagtgtcgaaaagcaggttggcgctgaccggtacattttgtccgcagaggcgtacattggcatccgggtggttcagagcagaggtaaaccagcgttgttcatagaactctttataattaggtaaatatgttttaggaacaatacccagtattttccctttttggaaaacaacagcactgttcagcagcgtggaattcataaccacaggcatccctataatagagatgatatccatttgtcgggtattattcataatttgcattaaagccatttctgcttcttccaacagtaaagactgaccgaacaagtcggcgcaagtataccctgtaatacttagttcggggaaaatgataatttgtactcctttcccgtctgctatggcaatttgagtttcaatctgttgtgcattaaatttgcagtcagccactttcactatcggaatggcagccgccactcttacaaaaccgtatttcatattatacctattattatatatacctgcaaaattaatcattctttcccgatttatacctctaaataaaaaaaataaaaaaaagtgcgtgatttatttgtttgttgcgaataactatctatctttgcacatgaaataaaattgtaatagttacaaaaagggaatatatgaagagttacgattatcttatcagttataacattaagccgtccgtacagcgcatagctattatggattatttgttggctcataaaactcatccttctatcgatgagatttatttggcgctatgtaaggatattccaaccttgtccaagactacagtgtataatacactgaaactctttgtcgagcatggagcagctttaatgcttacaattgatgaaaagaatgcgtgttttgacggcgatacttccctacatgctcatttcctttgcaagaaatgtggtaaaatattcgatttaccctatagtaatgaagtgaaaaaagtagagcaaattgatatgaatggattcaaagtggatgaaattcaccaatattataaaggtatatgccctgcttgttctaaagaagattaagaaagaagttaaaaaggatagagagtagatgattaactaataaataaaatattgactaactaataaaaaaagaaattatgaaaaagtttatttgtacagtttgtggttatattcatgaaggtgatgcagctcctgaaaaatgtccgttgtgtaaagcgcctgcttctaagtttaacgaaatggtagaaacagaaggtggattggaatttgcagaccaacacgttatcggcgtagcaaaaggttgtgatgaagaaatgattaaggatttgaacaaccatttcatgggtgaatgtacagaagttggtatgtatttggcaatgagccgtcaggcagaccgcgaaggttatcctgaagttgctgaagctttcaaacgttatgcttgggaagaagcagaacatgctgctaagtttgctgagttgctgggtgactgtgtgtgggatacaaagactaacttggaaaagagaatgaatgctgagtcaggtgcttgtgctgacaagaaacgcattgctactcgtgcaaaagctttgaacttggatgctattcacgatacagttcacgaaatggctaaggacgaagctcgtcacggcaaaggttttgaaggtttgtacaacagatatttcaagaaataatatacaatttgctatagtataaatggagagagggggagcaattattattgccccctctcttttattggttatatttagattagagatgtgtagggcttgtttctcattctttcagtaacacttcttcaatggctttcctgaaagtagctttattggctgctcctataatgatttgtggctgtcccgttttggggataaagatgatggtgggcagtgactgtattcccataacggcagataattctttttgtttgtctgtatctactttgtaaaatgcaattcgatctttgtattctttggccagactttttagcagaggggcaaccatacggcagggaccacaccatgtggcgtaaaaatcaataactgccggtttctctcctttgtatttccagttagtggaaccggaagtgtagtcaaatatattatccaagaacatttgtttgtccatacgtatgacttttcctgaatttttatctgacttatcctggacaggagtttgggcactgagatatcccgttaatccggcagttaatagaatacatgtgattgttttcttcatattttactcatattgggctagaatagtgcttaaatcattggcacgcattacaccgctttgtcgccacaattgcttaccgtttttaaaaatcattagtgtgggaactgactgaatctgatagtatgcagcaatttctttatgtttgtctacatctaccttgacaattcttactttttccccttttattccttttaattcttctaaaataggtttcatggctttgcaaggtccgcaccattcagcaaaaaaatcaactaatacagggatgtttgaggtgattaaatcttcaaatctttccataatgttctcctttcgttatttttattataataaaaacgtttatagggtgctttttgtttaaaagtaaagccggaacagtagactgttccggctttgcatatataaggttgatgaactattatttttttacagaagagggagtataacgtgcattcagtccgtcaatgatttcttgtgtgatgttgtatgccggattagcgtatagcaagttgtcaaatcctgtattgctgataatcagatcatatcctttgttctgattataaattttcaagaatgaattgatagaatcacgtaactgcaagctgttcttttggttttcagaagctagctcgtcgcttagtttctgttggagtgcctgcagttcttgttgttgcttcatcagtctcatctgttcttgttcagcacgttcacgtgtagcaaagccattattttccagtttgcgttggaattctttagcatcagcatccagcttctttgctttttcatttaaagtagtgcggatattttcttctttctgtatcatcacttcatttaagtcattccagaaattgtacttagtcaacagtgaatcgatttccacataagctattttcatgtttgaggaacctgcaacgccggcagccggagcagcggaagaagttgcagcgttgttgtttttgtcgctacattgtgcgaacactaacacgatggctagcgctagaaatccattcaggatgaaatttgttcttttcataatctttttcacgtattgtttattaattattatccgttttgctttgcttttcaatttcggctatggcatttttattaggtttgcgtgcttcacgatcttgtgattgcacacagcctattccttttttacggagtgccttattaccgcttacatgcgtgtttggaaactttccttttagaaagattccgatagacaataatgctatacagatagcaactattaacacagttataaggatagtatcaagcatttctattatttttgtggtgcaaagttagtgtaaggcaagggaaatgccaaatttattgaagcatttcgtgtctgcggactaaatttgcatagcaaatatagaattttgcaatgatttagctttctcttttttcattaaaaaagaggaagtgtcctatttaagagaattatttaaccattttttgcaaatttggaaacagaatttgcctaaacgacatgattatgaatgaaaagaatttaaagcctgcatctgtcttttattattttgaagagatatgtaaggtaccccgtccctctaaaagagaggagaaaataattgcttatttgaaagccttcggtagagaacatggtttggaaaccaagacagacgaagtaggcaatgtattaattaaaaagcctgccactccgggtaaggagaatttgaaaactgtgattttgcagtctcatatagatatggtttgtgaaaaaaacagtgatgtggagcatgattttctaattgatcctattgaaacagtggtggacggtgaatggttgaaagccaaaggtactacattgggggcggataatggtatcggtgtggcgacagaattagctatattggctgctactgatatagagcatggtccgctggagtgtcttttcacggtggatgaagaaactggattgacaggtgcttttgcattgaagccagggtttatgactggtgatattctgattaatttggactcggaagatgaaggagaattatttatcggctgtgccggtggggcaaatactacagcggaatttacttatcagcctgtttctgccccacaggattatttctatttccgtgtggcggtcaagggactgactggtgggcactccggtgatgatattaataaaggtagagcgaatgccaataagctgctgaatcgttttctgacccagttggcttctaaatatattttatatttatgtgagattgatggtggaaacctgcataatgccatacctcgtgaggcacaggcattatgtgcggtacctatgaaggataaggaatcggttcgtgtagatttgaatatctatactgcagaactggagaatgaatatgctgcgacagaaccgaacttgagaaccgaactctcttctgaatccccttgtaaggaagcgatagatatgactactgccggacaccttctgagagctgtttacgctgtgcacaatggagtgtatgccatgagtcaggatattccgggattagtagaaacttcgtctaatcttgcttccatcaaacaggtagagggaaacaagattaaaatagtgactagccagcgcagctccattctttcatcacgcaaggatatgtccgagatgatccgttctgcttttcttttgggaggtgctgaagtaacaactggtgaaggctatccagggtggaaaccgaatacggattctcctgttttgaaagttgcggtagatagctataaaaaactttttggtgtggaacctaaagtaaaggcaattcatgccggattggagtgtggtttgttccttgagaaatatccgtcactggatatggtttcttttggacctactttgcgtggtgttcattcacctgatgagcgtatgctgatacctactgtagataaattctggcgtcatttgctggatgtattggttaatataccgacaaaataatttatatgaagaaaacaattttatttctttgtttgtgctacctggtaggggtaacgtatgcacaggaaccgtttcgggtaatgttctataatgtagagaatttgttcgattgtcagcacgacacgttgaaaaatgattatgaatttttgccagatgctccgaaaggatggacacaagcgcgctatcatgataaattggctaagatagctaaggttattattgccaccggtgaggaaaatgttcccgatttggtggggctttgtgaagtggaaaatgatcattgcttgaaagatctgacagaaaactcgccattacgcgaggcaggttatcgttatgtcatgactgattctcctgatgagcgtggtattgacgtggcgttgctttatcagcgaggaagttttaagttgctgggcaaaaacagcctttctgttccttataaggagatggaacgccgccctacacgtgatatccttcatgtgatggggcaggtagcatcaggtgatactttggacgtgtttgtgtgccatatgccgtctcgtgccggtggtgaggaaaaaagtgagccttatcgtcttttcactgcacagatattgaacatagcggcagattccatcatgaaccttcgccagcatcccaatgtgatgataatgggtgattttaatgattatcccactaataattcgatagctaaagtattgggtgccgtggctccgaaaggtgaagtacaggctaagaaactgtataatctgatggacgggcgtaaggagggaacctatcgttatcgaggtgagtggggcgtacttgatcagctgattgtttccggttttttgttacaagggcatgatagtatgcgcacttcatatgataaggcacagattttaaaatatccgttcctattggaagaggatgaaaaatatggtggtgatatcccatcacgtacctactggggaaagaaatatcatggtggctatagcgaccatttaccagtgtgtgtggactttgaaattggaaaatagggagagaattagtggttagtgatgaatggactgcgctattatgccgcaggtgttaatcactaaccgctatatatttctattcatgatgataaggaccgttattcaatatagtcatcgcccggtatagctgttctacgaaaataaggcgtatcatttgatgtgagaaggtcatcttggataatgagatcttttcttgggctgcatcatatattttgggtgcaaatccgtatggtcccccaatgatgaatactaaccgtttgtttacagtgtgcattttgcgttctatccagttggcaaattctacggaacggaattcttttccatgttcatccaataaaaccactacatcgcccggcaacaaagctttcagaattagttctccttccttctctttttgttgctccatactcaggtttttggtgttcttgagttcggggatgacttccatatcgaaagaaatgaagtgcttggtacgttccacataatcattgatagcggtgatataatgtttttcgacagtgcgtcctactactaataatgtaaatttcatacgttcttttctggtttactttgcaaaaatacggaaaatctctacctttgcctatcaattcataaaaaaacgataacattatggacgaattagtagtaaaagacttaatagacagactgatagacctgtcttttgctgaagatataggtgatggggatcatactaccttgtcatgtattcccgcagatgcaatgggaaaatcaaagttgttgattaaggaagaaggtattttagcaggcattgaagtggctaaagaagtatttcgccgttttgatcccacaatgaaggtggaggtgttcattcaagatggaactcacgtgaaaccgggtgatgtggctatggtggtggaaggtaaagttcagtcacttcttcagacagaacgcttgatgctgaatatcatgcaacgcatgagtggcattgctactatgaccaataaatatgtgaagaaactggaaggtacgaaaactcgtgtacttgatacccgtaagacaactccgggtatgcgtatcatggagaagatggctgtaaagataggaggaggatgcaatcaccgtatcggtttgtttgatatgattctgctgaaagacaaccatgtagatttcgcaggcggcatacacaatgcggtgtcccgtgccaaagaatattgtaaggcaaagggtaagaacttgaagattgaattggaagtgcgtaactttgacgaattgaatcaggcgttggcagaaggtgtggatcgtattatgtttgataactttacacctgaagatactcgtaaggctgtagagatagtaggaggtcgttgcgaaaccgagtcttccggtggtattacttacgatactatgttgccttatgcgcaggcaggagtggatttcatttctttcggtgcgctgactcattctgtaaaaggattggatatgagcttcaaggcctgttaaggaaatgttttatgataagagagaattctaaattttggacttctttttgaaatgtgaatgacgcaagtggtacgaataaaattaaaatgaattcgcacatttgcgtcattgatattagtttcttttactttcttctttaaattgggtaggtgtcattcctttaacttgtttaaaggaggtactgaaatgcctctggcaggaaaagcctaccttgcaagatatgtcgttgatattcatgttggtatttgtaagtaaacagatttttctgtgtatagtgttcttgattttttcagtttggtcatagcaagacagtccaaatccatgatatgatgtgatgttatttatcttttcgtctctttgttttatctttgtcgttgaatattatagtaattaagtatatgaagaaaaaaaatgtttttaaatggtggggagttgttttgatattgtctatgtgttctgtccatgctgaggcgcaggatttgaaatctgtattgacaggagtggcaaaggccgtaattggtaacaaggctactacggctcattccattgtggggacttggacttatcaggctcctgaatgtcagttcgagagtgatcagttgctggcaaaggctggtggagagatagcggccaaagaagtggaagaaaaattacagacaatatatgataagattggtttggctggtattaagtatattttcaaggaggatggtacttattcatatatattgaaaaaacgtacggtaagcggcacttatgtttttgatgatgaagctaagacgattactatgaaaaataagttgggcatacagacggtagcttatgtgacagtgacaggaaatagtatgagtcttgtgtttaatgctgataagttgatgtctattctaaaggtgattactggagcggcttccaaagtaaattccacagctgccactcttaacagtgtagctgaagcttatgacgggctgatgttaggatttgaattgaaaaagtagatgctttttgtaaaatatggatacaggtgttttatgaaagttgaaaaatagtgattggaaataatgtttgaggataaagccgttttgacctaaccttattattatggttaggtcaaaacggcttttatttaaaatgtattgtttccgtatatactggtcatgaatgtgatatgttgcatatatgtgagaacgatttagggacattcattaaatattacaaaatcagccaactaattcatacacaaagtattgcgaattagttggcttttttgtatctttaggtattcccccgaaaataagatttgacggccaaaacgggggaaatatccaaactaataagatatggcaaagatagtgaatatttcagaaattcaccctactttgggttttacagaatttgatattctggaaaaataccgcaagagttttaatgagagtgagcttggcaagcttcattcggtctttccttttgaatgtatggcaaaagccgccggcctgtcggaccggcgcctgggacgcaggaacagattcagtccttccgcaaagatcgcccttatggtcctgaaggcatacaccggcttctccgacaggcaactggtggaacatctgaacgggaacatacactaccagattttctgtggaattatgattcccccgtcccttcccataaccaacttcaagatagtcagtgccatccgtaatgagatagcatcccgccttgacattgattctttccaggagctcctggcttcacactggaaaccttatcttgataaccttcacgtctgcatgaccgatgccacatgctatgaaagccacatgcgttttcctacggacatgaaactcctttgggaaagcctcgaatggctctacaggcatatatgccggcattgcagggagctgggcataaggcgtccgcgcaacaaatacaggaatgtggcggaatcctatctgtcctactgcaagaaaagaaagaggagagcttcaaggacaagaatgcttaagcgccgtatgatcaagcttcttgaaaagctcctcagtcaaagggatgggatccatagcgagtacggtgctttactccgatatacccaggattatcataagcgtctttccatcatcagaaaggtgcttgtacaagaaaaggaaatgtttgaagggcggaaagtcagtgaccgcatcgtcagcattgaccgtcattatgtacgtcccatcgtcagaggcaaggaaaccaagtccgtcgagttcggtgcaaaggtcaataatatacagatagacggcatatcgttcatcgaacacctctcgttcaaggcattcaatgagggtatacgcttgaaggactgtatccgtatgcagcagaagcttatgaatgtaagggtaagatgtgtggctgccgattccatatatgccaataatgccaacagaaagttctgtacaaaatatgggatatccacatcctttgtgcgcaagggaagggcggccaaagatgagcctttgaggaaggtgcttagaagcgaactctcaaaagaaagggcaacacggcttgaaggaagcttcggcactcaaaagcaacattactcgctctcaaggataaaggccagaaacaggaagacggaaatactgtggattttctttggaatacatacggcaaatgccatactgataatagaaaaaatcagaaacaaaacagctaaagcagcatgatatgattttactcacagaatcagaagaggtcatcagacttcttccggaacgtcatgtcctgtcggatagaattatgtgagaaagcacggaaaaatgacaataagaatggcatatgaaatggtcatgccctatcatcttcatatgccatcttattttttagagacatttactgaatatccctattcttgttctttcagtgctgcgaaaatcagaccttccagttcttccgccagttcggggttgtcctgaatcacttgtttggaggcgtcacgtccttgtcccagtttggtttcgttgtagctgtaccatgaaccgcttttcttgataatgcctaaatcagcacctaaatcaatgatttcaccagctcttgagatcccttcaccaaacatgatatcgaattcggctttacggaaaggaggtgccactttgtttttcaccacttttactttagtctggttgccgattacttcttcaccatctttcagttgagtggagcgacggatatccaaacgtacggaagcgtagaatttcagagcattaccaccggtagttgtttcagggttaccaaacatgataccgattttttcacgcaactggttgataaaaatacaagttgtattggtcttgctgatggctgacgtaagcttgcgcaaagcctgagacatcaaacgtgcctgtaaacctactttgttatcacccatatctccttcaatttcagctttcggagtcaatgccgcgacagagtcgataacaatgatatcaatggcggatgagcgtatcaattgctcagcaatttcaagtgcctgttcaccgttatcgggttgtgatatccataagttatctacatccactcccagtttggccgcatagaaacgatcgaaagcatgctcggcatcaatgaaagcggcaatgccgcctgccttctgagcttcagcaatggcatggatagccaatgtagtcttaccggatgattcgggaccataaatttctatgattctacctttgggatagccgcctacccctaatgcggcgttcaaggcgatagacccggtaggaatcacttccacttcctgtacgttgtcatcacccattttcatgatagagcctttaccaaaagttttctctatcttatccattgcagcttgcagcgctttcagtttttcactatttccggcactcggacttgctgagaatggaatttcttcgttatctttttttgccataaatctgttggtttataaaatttgttgtgcgtgctcttttgttttcacctctttgggagagatgatacgttcaatcacgccttcttcgttaatgatgaaagttgtacggaatgtacccatatatttacgtccgtacatacttttttctccccatactccgaattgttctaccaacttcttgtcggtatcggcaataagagtaaagggtagctcattcttttcaataaatttctgatgcgatttggcatcattcacactgacaccgattacttcataaccatgggcgcgcagttccgcataattatcacgcaaattacatgcctgggcagtacaacccgatgtcatatccttaggataaaaatagagtactatcttttttcctttataattacttaaacgaatttcttctcctttttcgtttaagcctaatatttccggggctttatctcctatgttcattttttagtggttaatgattaatgggtagtgtggcccaagtatgaattatgggccattaatcactattttaaagttctagatcaccatcgaatacttcatgccaaggcaaaccttgtttgttcagttgttccataaatggatcgggatcaaactcttccacattccatactcccggacgtttccacaatccttgcaggaacatcatggctccaatcatggctggaactccagttgtatagcttactccctgcattccagtttctttgtaagcttcttgatggctacagttgttgtaaacatagtaagtacgttctttgccatcctttacgcctcggatgcggcatccgatagaagtttcgccttcataattttctcctagatcctgtggattggggagtacggcttttaggaattgtaacggaacaattttcactccgttataatctatttcgtcaatgcgggccataccgatattctggatgacacgcagatgagtcaggtattcctgaccgaaagtcatccaaaagcgagcacgtttgatggtcgggaaattcttaactaatgattccagctcttcatgatacagcaagtaggaatcacgaggaccgatattgggataagtcagatccttgtggtattccaatggcttggtggtcacccatttgccttcttcataataacgtccgttctgagtaatttcgcggatattgatttcaggattaaaattggtagcgaacgctttgtgatggttgccggcattacagtccacaatatccaagtagtgcatctcgtcaaaatgatgttttgctgcgtaggctgtataaatgccacttactcccgggtcgaacccacaacccagtatcgctgtcagtcctgcgtcttcaaaacgttttttataagcccattgccagctgtattcgaaatgagcttcatcctttggttcatagtttgctgtatccagataattcaccccggctttcagacaagcttccatgatggtcagatcttgataaggcagagctacattgatgacgatttcgggtttgaaactattaaacagggctaccagttcgtctacattgtccgcatctacctgtgcagtcttaatagctggattgccgatagcttttacgattgcatcacattttgattttgtacggctggcgatcatgatgtcagtgaatacatccggattctgagccactttgtgtgctacgacagtacctacaccgcctgcaccgataattaatactttacccatttgctgttttttattcttgttaaaataaaatgcccggcagacattaccgttcacagggcaaagataacaaaatattttgggtattagtggatacggtctagtttcttattggtgaaatctaaggtttttctttcgtaggaccatgtttcatagccccccgtgactatatgaatgcgcatgggattacccaatgccagacgacattcgtcggttgtcattccttttcgtaccttaccgcggcttatcatgttccaaacttcttctgtgatattcggatacttggttcgtaagttgcctatgccgaatagatccgtaaaataattgtctgattgtaaaatcacatcaactacactcgtatgggtgaatgcagcttttatcttataattctttccatctatgtcttccagttctaaaaagacgtaaggagagttgttttgtgagattatatttttgatggtgaattgtgtatatcggggaagtctcaccggagtgtctgtttcatccagacattccgtttccgctttcagatagacagttttttttccatatttactcatcagattctttgatttttttgtatttgcatcactgaagctaaatgaatttggaaaatatttatttttattttccataataaaatcactgtctgccatgccacaattagtctttgatatagctactggctgatagtaggtgtttcctttcttgtcttggaatacgatttttacagggtatgcgcggctgcccactccgacagctgttactgttacttcttcatttataccaatcgggacctctttatagcccgatatgctgttgggatcatctatacgtactttattggtacgcatatatagggtttgtccttccagcagttctttggctatgtccacatcacccaggtaggcaagggtaggaataccggctttgggcttcaggcaatattgttccagggtggtgtttttaagttcgtgataatattgttgcccttcacattcaaagttaaaatgtacaaagccccgttcggtaatttccgaacccagatattcaaaaatcttatgttttaactctcctgtatccacctccttgttggtttccgccgatttaaaaggaggaataatgatgtctttacgttccggcatcaccatgaatttcatgcctggtgtccagtcacacaggttgtaatacttgaaatgatcgtttataaactgtttttccaaagattctacggaaatacttgtttgttgtgaagtagtcgtgactatatatccgttttgtgcataagtgcataggctacagcttgttgccccaattaaaatggctaaaaaccttttcattgctttaagtgttagtatatataaattgatacaaaggtataaaatttttgtgtataattgctatagtgaaaaataaaatggttagttttgcacactaaactaacagatttaacaaaaaaataatatgaaaaaactagtattgaaaatgatggctgtttgtgccggagcattgattgtatcttgtggtagtggaaagaatatgttgtctgtttcttctctggatggggaatggaatattacagaggtggatggacagaagatatctacagagagaatgcctttcattggttttgatgtagctcagaaacgtatttatggcaatagcggatgtaaccatatgatgggaagttttgaagccgactctctgaagccaggtacattgaagtttggacagataggaagtacccgcatgatgtgccctgatatgaagactgagcagatggtattgggtgcattggataaagtgacttctttccagacggtttctgacaagcccgacgtgataactctatgtaatcaagatggtcagccgttgatgactttggaaaagaaggcggctccggaagtgtcactgtctgatctttcaggagaatgggttattgaattggtgaatggaaagaagattgtaggtacggctgaggtgaccccttttatcggttttaatttggatgaaagccgcatttacggtaatgtgggctgtaataccataaatggtgcgttaatgcaggaagatggaaaacccaattctttgagatttgacaatgttgctactaccatgatgatgtgtcctgatatggaaactgaaactatcgtgctgaatgctttgaatgaaacaaaaagtttcagcatgaaagatgataaagtatatttgttaggtgaaaatggaaatgaattgttggtgttgaagaaacaataatccatctacattcgaattgatatgggtcggcctgttttctcataaacgagaaaacaggccgattgcatttatggcattatgctaggatgctgacaggtattgtatttggtggagttctgacattcttgccttatatgaatccatttaaaagtatcatatagcaaataaatcagtcattttgtcagcctttgtcacattcttatttttggcataccgtttgttttatgaagggcgtgcggttggtgcaccaaagaaaaaagaagtccttcgtgaaccattcgccaagaaatcagtttaattgaaaacaaataaataaagatatataattatgggaaagattattggtattgacttaggaaccacaaattcatgtgtttcagtatttgaaggtaatgaaccggtagtaatcgcaaacagcgaaggtaaacgtaccactccgtctatcgttgcatttgttgacggtggcgaacgtaaagtaggtgatcctgcaaaacgtcaggcaatcactaatccgcaacgtactattttctctatcaagcgtttcatgggtgaaacctgggatcaggtacagaaggaaactgctcgtgttccttataaagtagtgaaaggtgacaataatactccgcgtgtagatattgacggacgtctttatactccgcaggaaatttcagctatgattctgcagaagatgaagaaaactgctgaggattatctgggacaagaagttacagaagccgttatcaccgttccggcatacttctcggactcacaacgtcaggctactaaagaagctggtcagattgcaggtctggaagtgaaacgtattgtgaacgaaccgacagctgctgctttggcttatggtcttgataaggctcacaaagatatgaagattgctgtattcgaccttggtggtggtacattcgatatctctatccttgagtttggtggtggtgtattcgaagtactttctactaacggtgatactcacttgggcggtgatgacttcgatcaggtaatcattgactggttggtacaggaattcaagaatgacgaaggtgcggatttgacaaaagatccgatggctatgcaacgtctgaaagaagctgctgaaaaagctaagattgaattgtcttcttctacttcaactgaaatcaacctgccatacatcatgcccgtagacggtatgcctaagcacttggttaagactttgacacgtgctaaatttgaagctttagctcacaatttgattcaggcttgtcttgaaccttgcaagaaggctatgagcgatgcaggcttgagcaactctgatatcgatgaggtaatccttgttggtggttcttcacgtattccggctgttcaggaattggtagaaaaattcttcggtaagactccttccaagggtgttaatcctgacgaagtggttgctgtaggtgctgccgttcagggtgctgttttgacagatgaaatcaaaggtgtggtattgctggatgttactccgttgtcaatgggtatcgaaacattgggtggtgtaatgactaagttgattgatgcaaacactactatcccggcccgcaagagtgagaccttctctacagctgccgataaccagactgaagtgactatccacgtacttcaaggtgaacgtccgatggctgcacaaaacaagtcaatcggtcagttcaatttgactggtattgctccggctcgtcgtggtgttcctcagattgaggtgacattcgatatcgatgccaacggtatcttgaaagtatctgccaaggataaagctaccggcaaggaacaagctatccgtatcgaagcctcctctggtttgagtaaggaagaaatcgaaaagatgaaagccgaagctgaagctaatgcagaagcagacaagaaggaacgtgaaaagattgacaaattgaatcaagctgactccatgattttctctactgaaaatcagttgaaggaattaggcgacaagttgccggctgataagaaagctccgattgaagctgctcttcagaaactgaaagatgctcataaagcacaggatttggctgctattgatactgccatggctgaactgaatacagcattccaggctgccagcgctgaaatgtatgctcagagtggtgcacaaggtggcgctcaggctggtccgggtgcaggacaacaggctaatcaaggttcttcttctaataacaaagaagatattcaagatgcggattttgaggaagtcaaatgattccgataaggaaacagataacaaacaataagcaaaagcgtgcagctcaatgagctgcacgctttttgcttattgttatatacttgtcgatataagaacactgagttctttctctttaattctaaagaatctatttgccattacaagtatttaagtcctcattaaaatataaatcatgatattatatttttctttgatgatttatttaattaacctaggtaatggcaaatatgagattagtaaaattaaagaaccgtccgagtaagggcgttttcgtttttgaatacatgcaggagcagatagagcgtcttagagggcaaggaaaagaacggacagtcgaaacatatcagtccgcattgaacagcttcatgaagttccgtgacggcatagacttatgttttgatgagatggatgcagatttgatggaacattatgaaacggagatgcgctccactcaccatttaagtcgtaataccacctctttttatatgcgtattttgcgttgtgtgtatcgcaaggcagtgggggagggactggcccttcctgcagatccttttgagaatgtatatactggtgtggacaagacctcaaagagagctgccaccctgacagatatcaaacacatcaagcagttggatctttccgatcataaatcattggaatttgcacgagatatctttctcttttctttctatatgcgaggaatgtcttttatagatcttgcctatttgcgtaaaaaagatctcaatagtggctttgtgagttatagccgtcgtaaaacaggtaagaaactcattatacggtgggaaaaacagatgcaggagattattgacagatacggagattcggaaacacaatatcttttacctattatagaacgagaagatggcacggagcgcagacaataccggaataaaatgttgctggtgaaccgtaagctgaagaagattgcagcccgggcaggattgaccacaccacttactatgtatgtggcgcgccattcctgggcaagtatagctaagacgaaaaacatctcgattggtattattagcgaagcgatgggacatgattcagaaactactacacaaatctatctttcgtctatacagactaatcagatagataatgcaaatagaaatattttaaaagatctataagaaggggaatatttgaattattttgaaattaggacgcactcttatatagagagcgtccgatttcttaaatttctgatttccatttatgtagtaagttgtatgaataaaatcagcccataagtttattatatatagagagagaaaaaaactttttttatcagtttacagtctgtaaatgctagaaaatgaaaataaatctatacctttgcagccgatagacgctctctatataagagtgcgtctgtttttagtcggattattccactatgagtattgtaaataacaagggcaaagacatgccacaacaaattttgggaacgacggttcaaaagaccgacgacgccgtaggcatattccgaaatgatcaggaaaaaaagcattggtatgtggctgttgtaaataacagaagtgaaaaagcctgtcaggatagattacgaaaacgtttgaaaaacgaaactgatagtgagaaagcttatgaagtttatgtccctatccaacaggagatgagtattcgtcatgatggtaaacgtaaaaaagtggaccgtattgttttccctgctcttgtgttcattcgctgcacagattcagtaagacggaaagaaatagtctgccttccttatataaaacgtttcatggttaacatagccggttcttcccgaaatacttgccgtcccgtagctattattccagatcatcagatgtacagcttgatgcgtatggtcaatgatgccgaagaacatgtcactattgagtcatgccctctgcatttgggcgatcgtgtccgtgtaaacggtggcaaactagtagggttggaagggaatatatgtcgtgaaatagatggttctactagtctggttgtaaaaattgatatccttggatgtgctaaagttaccattgctagagaattgctggaacctatagcggaaaaaaactcagttaacatataattatatattgacatacaatgaccatagcagtagactttgacggtactattgttgagcacaagtatccggcaatcggcagggagttgccgtttgccattgagacattgaaaaaattgcgtgacgaacatcacaggttgattctatggacagtgcgtgaagggcgtctgcttgacgaagctcttgccttttgccgtgatcgcggtcttgaattttatgccgtgaaccgcgactatccggaggaggagaaagggcgtaacaatcattactcacgcaagctcaaagccgatctttttatagatgaccgcaacttgggaggccttcccgattggggtactatttatggaatgattcatgacggaaccactttttcggatttgatacgtaatgccggtgaatctcctgtttcggagaatcacggcagaggtcttttttcgcgcctgtttggcagatgattgaataataaatgaaaaaactgatatgaagactttaaagaaactattattgtttgttgtggcatccgccttgttggcaggctgcacctcctataaaaatgtaccttacatgcagaatcccgaggtagtgaacagttacagggaagatcttcccctttatgatgcaaagattatgccgaaagatttgctgagtataactgtgaacacgagtgatcctcaggctgccgctccttttaacctgacagtacagactcctctgaatgcagccctgaccaatattaatactaccacacaacccactctccagcaatacctggtaaataacaagggtgagatagatttccccgttatcggtcgtctgaaggtaggcggccttacgaaaaacgaggcggaagatttgatccgtgagcaattgcagccctatctgaaagagagtcctatcgttacagtccgtatggcaaattacaaaatttcggtattgggagaggtgaaccgtccgggtacttttaccgtaggaaatgaaaaggtaaatatccttgaagcccttgccatggcgggagatatgactgtttatggcgtccgtgacaatgtgaaactgattcgtgaagatgcaaaaggcaagcgtgagattatcaatttgaatcttaataatgcagagctggttgtatctccctattactacctgcgccagaacgatatcatctatgtaacgcccaataagacaaaagccaagaactcggacattggcagcagcaccagcatatggatcagtgctacatccattttggtatctcttgcaagccttctggcaaccatcttgaaataaaactcataaatataattgttgattacaaactgttgatatgactgacgaacagaagaacaccccttcgggtaccgagcaacgtgaggagaacgttgatctttatgccttgttttttaaatactttgcctattggccgtggtttgtagccagtgtgctggtttgtattatatctgctttcatctatctccgttatcaagctcctgtctataatgttgatgcggccgtactcatcaaagaaggtgacaagaaaggtggaagcagtaataatcctatgggagcccttcaggatctgggtatgttctccatgactaacaattttgacaatgaggtggaaatcctgaagtcaagaaccttgattaaaaaggtggtgaatcatttgaatttatatatttcagtggccgaggaacgtatgttcggctataacactcctttatataagtccactccggtaaaagtttatatgactcctgaagaggcagacaatctggaagaaggagccaagcttcatctaaaatacaccatgaatggaaaattggatgtaaaagtggaatatatgtttgacgaggagaagcaggagactgaggtaagttttgacagtattccggctgttttccccactccagtaggagttttcagttttacaaagaacgactcggtcccacctttggaagaagatatgaatctggtggcatacgttaattctcctacagatgtgacggaaagttatgtagagaatttgtcagtggaacccacttcgaagactaccacaattgctgccatcagcttgcagaatacggtaaagcagcgcggtatcgatttcatcaattgtctggttgacttttataatctggacgcgaatgacgagaagaatgaagtggctcaaaaatccgcagagtttatagacgagcgtattggcattatcaatcgggagttaggtactgccgaaacagaacttgccgatttcaagcaacgctccggattgaccgatttgaccagcgatgcccgtctggctttggaagagagttcgaaatatgaacagcaactgaccgagaatgccacccagttgagactggtggagtccttgcgtaactatgtgaacaatccgaagaatgcaaacgaggtgattcccgctaatgtagggttgcaggaccagaatttgggttctatcatcaaccaatataacacgatgctgatcgaacgcaagcgtttgctccgtacctcttccgaaaacaatcctgcggtaatcaatatcaatacgggcatcgagtccatgcggcacaatgtgcagactaccgtgaacagtgtactgagagggttgcagatagcgcagtccaaccttgaacgtcaggcacggaagtttgaaggcaggatcagcagtgcgccgcagcaggagaaagaatttcttactatctcccgccagcaggaaatcaaggcgaccctttacattatgttgcttcagaagcgtgaggaaaacgcaataaccctggcatccactgctaataacggacgtatcatcaaagctgctcttcctagtaaaaagccggtttctcctaagaagatggttgttatgctgactgctcttgtattgggtatgggtattcctgtaggtttcatttatttgaaggatttattaaaatataagatagagaatgccgaggatgtggagaagataacggatgttcctattttgggtgagcttcctttaagtaagaagcccgaaaaaggtgccattgtggttcaggagaatcagaatggtatgatggaggaggcttttcgtggtctgcgtaccaatatgttgttcatgcttggtgccagtcagaaagtggtgctttttacatccacacagccgggtgaaggtaagtcttttattgctggaaatacggcagtcagtctggcctatatgggtaagaaagttgttattgtgggtttggatatccgcaagccggggctgaataaggtctttaatctgtcccatcgcacggaaggtattaccaattatctggctgaccccgagcataccaatctttttgatatgatacaacattcggatgtaagtcctaatcttgatattcttccgggtggtcctattcctcccaatcctacagagttgatggcgcgtacggtactggaagatgcaatagagaaattgaaagagcgttacgattacattattcttgatacggctcctattgctattgtgaccgatactgctattgccagtcgtgtggctgatatgtgcgtgtatgtgtgtcgtgcagatgtaactccgaagttggggtatcagtatattaatgtgctgcgggatcagaagaaattcgataaattggctacagttattaatagcattgatttgaattcaagaaagagtggctatggtagtaagtatggttatggttacaaccataaatatggctatggttatggaatggaagaaaagtatggcaaaaagtaatataaactagattaatagagcaagttttaattatttataggatggatgttccgtatattgtttttatattatttttgttattgctgtctggattatattggaaaaatccaaaacgcacatattttgtgatagcaatatgggttgtcttattttttattggatttcgctcaagggtggtaggtggagctgattctattaattatgttcgtttttttacgggagagcaaaatttttataatataaatgatacgcgtgacttggaaccattattaatggcatacaatgctgtgttacgggtgcttttattcaataatggtacattatatctatttgtaaccactttcattgggcttttttttatatataagatggtagataagtattcttataataagatgctctctgtattatttttctttttctttttagattatagtttattcttttatgccttaaggcaaatgttaggaatttctgtttatttaggtggccttctttttttattaaataatgaaaagtgtagatataaatggctaatttacggcttgtgttgcattggtggttattttatgcatacttcaatttttatttatggtgctgtaataacaatattatattttatacctataaaaagaaaactctatttgtatgttgctattcttggaagtgctatgcttgggattgtttttaaacaattaaatttcatggacttttttaatatgtatattaattggggggggatatcagcaacagaacgtttggattcttatttatattgggatgatatacgggatacaacatctgttagtttattgctaagacctaccatattagtattaatagctatcctcttaatggataacgaaaaagtaagtcatttatttacgaaaatctgtgtgtttagtgttgttgtaagtaatattttctatgatgtgcctatgatacatcgatttactatgggattttcattttatataatagtggtgataacatggattctaggggaaaggtatagagctagtatgaaaagatgtaaaatagtaaaagtggttctattgataattgtcatttatttcactaggtcttacatgattgcttgtacagattatgataagaactcagtaacgcaaatgcatccttattacttcttttttgaaaaggaatagccgtgcagcaaaataataagcgaatagccaagaatactttgcttttgtatttccgcatgttatttacaatggcgattagtctatatacttctcgtgttgttttggcaacgctaggtattgaggattttggcatttacaatgttgtgggtggctttgtagctatgttttctgtaattagtggagcgatgacttcagctacacagcgttttatttcttatgaaatagggaaaggtgaagagggtaatgtaagtacactttttacgaccgctgtaataatacatatatttcttggaggaattgtcttgatattagctgaaactataggtctgtggtttcttaatactcaaatgaattttccagagaatcgttatgtcgcagttaattgggtatttcaattttcgatcattacttttatagtaaatgtaattagtgtgccttacaatgctgcgattatagcttatgagcgaatgaaggcatttgcttatgtaagtatcattgaagtgacattgaaacttttaatagtttatttacttgttatatcttctgttgacaaacttatactttatgcttttttattggcattagttgcagttactattcgattagtttatggtttatattgtaagcgatatttcaccgactgtcattgcaattggatttatcataagtcgcatggtgcagagatgttttcatttgtcagttggaatttgattggttctgtagcaagtgtaacaaaagaacaaggtataaatattgttttaaatattttttttggtgcatctgttaatgcagcacggggcattgcttatcaggtactaaatgcgttaaatggttttgtaaataatttccaattggcaatgaatcctcagatcgttaaatcctatgcggcaggtgaaaaagaggctatgtttcaattagtttataaaggtagtaagttttcctatttaatgttgcttctattctcactcccaatattaattgaaactccttttatattgaatttatggttggaagaagttccccaatatacgacaatctttttgaggttggttttgatcacagcattaattgattctttatccgggacacttattacttccatgcacgcttcgggcagagttcgtaattaccaattgatagtggggactatttcgttattaacccttcctgttgcatatatattcttaaaaaatggatatcctccttattcagctatgattgtaggtgttgttatcgcttttatatgccattttgcacgacttgttttattaggaaagataataggttttccaatttcaagtttcttgcttcaggttacgtttagggtgtttgttgtttccctatttgctttgcttatgcctgtttggctttactcctgtctggatgttacttggctttcttttattattgtttgtatagtatgtgttatttctactatgctttcctgttattatatcggattaaagaaaaacgaaagagattttataaaacaaaaaataggagtaattatatcaaaagttattcgatgaatattgaatctataaaagattgttacgggtgtggtgtatgtgccaccgtgtgtccacgggatataataggaatatcgttaaatgtattaggtttttatgaacctgttattttagatagttcacaatgtatagactgtggattatgttgtgaagtttgttcttatctccacgatgagctttcgctacagaaggcggaaatacagagttgtgctgcttggagcaaagaaaaagcagttcgacaaaaatgctcttctggtggagtgggttttgaagtgggacgtgctttgattaataaaggatataaagtttgtggtgttcgatataatactgaaataaatcgtgcagagcattatatcgcttctaccgtggaagaactaattccttctattgggagtaaatatattcagagttatacagtggatggcttcaagtcaatagatcggaaacagaaatatttggtgacgggcactccttgtcagatagattcttttcgtcgttatattcgtaaattcaagaaagaggaaaacttcatattgatggactttttttgtcatggtgttccttctatgttaatgtggaacaaatacattaaggaagtggaaaaaaaaattggcaaaattacggatgtgtcgtggcgcaataaatttactggttggcatgattcgtgggcgatggttataaacagtgaaacaagtaatgagaaaaatgataggagtaatatttccgacttattgacagcggaagaaaagagtaagtataattctcgcctttctcaaggagatgttttttaccgtctctttttgagcgatacctgtttggggaaagcctgctatgagaaatgtaagtttaaatatgatcgttcgtcagcagatattcgcattggtgatttgtggggaagaatgtataaacataatgaagatggggtgagtgctgctgttgccttcacacaaagagggtgggagttattgcatgaatgtaacttggagattgtagaacattcttttgatgtggtagctgaaggacagatgaaggaaatgccaatatgtgatgaactttataaaaggatgaaaattttgcttcaaagagatgatttagatataaaccaaatatataggcagctattgattgctttgaaatatagaaaggtgatgaatagactgaaacatcctgttaggacaatgaagaatatattgaagaaaataggaaagtaatgaagatatgtacaatcacttgtcaccgtgtgtataattatggtgcatcattacaggcttatgctttacaaaactatctagaaggtaaggggcatactgtaaaaattatcgattacaggccttggtatttgaatatgcgctataatttttggtttatagcaccaatttcaaggatgtattcagtagcttcccgattttggattattagatttatctattgtttgcttaaaagaagagatgcactaaaaaactatggtagaaaaagagcttttgataattttactcaacagtatcttcgtttaaccgaccggtcctataatacgttagattctttaaagaatatgccacctttggcagatttatatatagctggaagtgatcaaatttggaattcgaattataataatggccgtgacccagcattttatttagattttggtagcataaatataaagcgggcatcatacgctgcgagctttgcaataaatgcaatacaagaggaccgaaaaccctttgtaaaaaatcaacttaaaaaatttgattatatttcagtaagagaaaggacagggttggagatacttcggaacttaggtataaacgatgcgtttttagttaatgaccctgtctttttattagataaagaaaaatggcttcatttacttaatcattctaggaagtataaattaccttgcgaagattttatacttctatatgattttgtaggagatgagagaattgaaaagtttgtaaaggtgctttcggttgaaaagaacttaaaaattgtatcagtcaatgattttgaaaagcgtaaatatgctgatataaacatatctaacgcaggacctttagaatttttaaatttaatacgttgtgcttcttgtattgtatctaattcttttcatgctacagccttttcagttatattggaaagagaattttatgtattttcattacaaggacatgataattctacccgtatgagcgattttttggctactatacatttaaaagaaagatttaatccctgttgcagttcaaataaaaatatagattatttatcagtgaatagtatgttggcaccttacattcaagacagttactcttttcttgataaggttttaaatgattaagtatttaataaatctatttaatgaaagtaagcagtcaaaaattggctcataattgaaatctctatcttcgctgcgaacaaaaattttagaatttatgtatagcagtgaagatcttgaaaggttttactttcagtaccagaccgaggctttgcctcatggagaatctctccaatcgttttgtgttaagaacaaagttccttataacatctttcagaaatggtacagggatacccggaaaaaagtagttgaagtccaggttgatggtgctcctgtaatcggtcatgaggaaaaatccagtgccattgatcaacctcaaccggtattaccaggcagaaatgatcatccggttcgtatttgggttgagattcgtatcagcaatggcttgcatttgtcccaaaagaatttaagctacccggatttggttcgtatggtagagaaactggaggggttatgctgagtgttaccggtctgaatcatttttattatgtccgtgatttcaccgatatgcgttgtaaacacagccgtgtgctgtctgtcattcgtgaacggcttcaccgtgagcccaatgatggagacgtctttatagtcatgtctcgcaatcgcagaatagtccgtatgttttcatttgataatcgttcatatagtctgttcgaaaagaagtttgtagcaggctatcagttcatgaaagtggagcggaacggggcagatactgtttatcggattgcctggaaggacgtggttttgattcttgagaatcctatagttaaaacattgaaaatcagataatcaatctatttatccacttgcggttttgcgattattttattacctttaatgttgtaaatcaaaggtttaagtatgatcgatctgcaagatataattacaacaaaacgagagttgttgggtagggcaacctactcacgcaaccctataaattatagtgcaggtatggcagaggatcagaaagaccgatacatacaataccttgctgagcaaaatcaggatctcaggttgacaggtgatgccatgaagcttgttttggaggattttatggctcagatgaaagaactgaagggtcagatgtcatccatgcaatcgaaacatgttgaccttgagaatcggttgtcagaagagcataaacttcgcaaatcggctgagcgtaagataaaatcacttcaagaaaaacttgattatgcccatcaggaacgttttggtgatagacgtcaaaagatcaaatctaaagctaagccgggtgattcagaccgccggaaggagaaggatgattatgatggaaccgatgatacgcttcgtacggattcagttggtcatgctccatctcaagaggtaaaagagtcttccaagaaagagcgtgatttatccaatcgccctgacggttataaaaggatgggagtagttggagaggcgatagagcatccttccgatttgacaaaggttcccggtcgcatcattgaaagaagaatggtacgggtattcagttttcgtactttcttgacggaagaatgcttcgagatggttcattatgcagagcctggtaaaaagcccaagtggggttatttcccttccgaaggtcatcctgaggtagtaaccaatattgaaggcactaaggcttctcctgaatttctgcaggctattgcctatgaagtttatgtaaagaatgtgacttttggtcttcttcaccaatggctgacagatatgggcatgaccatttctaaaaacacgttgcgcaactggcttaagaaaggtaagacatacctggacgaattggtctgtgtattgaagtctatagctttggaaaaagattcgattgtgaactgcgatgagacctggtgtaaagtgcgcaaatacgatcactataagaagtgctacatttgggttctggtcaacaaggctcggaaaacagccattttcttctatgagaatggctcgcgtggtcgtgatgtacttacagactttttgggcgatgcagaattgaagagtattatgtccgacggatacaatgcttatgtatttatcggcaatgagctgaaatcaggccggtttaaagatactgtacaccaagtttgtatgtcacatgccaagaacaagtttgtcaaggcttccaatcagggtagtgaaccgaatgcagaacgcttttccgaaattttaaaggagttctttatgagggagcgtaaatacgatgatgccggattaactcccaaggaaaggttccgagaaaggcaaagcctggcaacgaaggaacttctgatagagttgcgcagcttgttagatagtgaactgacaaaggattcagaatttagaagtcagtattataaagaagctctcaattatctgaaccggttctggaaagagatctttgcttacttggatgatggtgaattaccgatagacaacaacttggctgagcgaaccattcgaaagctgactactcaacgcaacaattcacttcattatggtagtgatgctggtgctgagatggcggcaacctatcacagtgtgattggaacggtaaagcttcatggcagttctatctggaacttcatcggaacttttttcaaaaatatctttaacgggtgcagggattatgttaacatggttcctgacaaaatcactttggctacaagccaatgttaaattcaagactaattttttaacaaaactcggtttagggcactgaaaagtgccctttcgaaggggtatgccctaaattgagtgcttacttaatgaaagttctttggtttgaaataagtactcctagttgctactactctgataatagagtggtgggagggtggcaagattctttggaatgcattgtcaaaagatgttctgatattgaacttattatagcgtttgaagctcatgaaggtagtgaagttaaaataattgatggcgttacttatgtgcctctcgtaactcactatacattttgggaacaacagtatgcaaaattcacttggaaagtaaatgaaaagaaattattagagaaatgtattaaaatagtaaatgtttataaacccgatttaatacacgtatttggttgtgaatggccatttggacttattgcagggcatgttaatgttccagtcgttatccatatacaaggaagcattattccttataacaatgcgctttacccacctaaatataatggatatacctttattcgaggtgccggattaaaccttagataccaattttggttttggagatctacctataaagatgcttcacgtttaaaaatggagaaacgcatttggaaacttgttaataattatatggggcgtacagaatgggatcatgcgctaatgaatactcttcatcctcaagctcgctattttcatgttgaggaagcattgcgtccatcattcttgcagacttcaaaacgatggaaaatgcctcagaataataaggtttgtatactttctgttggctgcggctctttttggaagggtgttgatgtaatgctgaaaacagctcatgtcttaaaatcattaggtgtggattttgaatggaaagttgcaggtactcttcctccaatgctcaaattaataattgaatataaggagaagctcgcttatgctgagaataatattgagtttttgggtaatgtgcaagctgacaggttggtagaccttctttgttcctctaccatgcttgttcatactgcctatatagaaaatagtccgaatgcaatttgtgaagctcaatatctaggagttcctgttatttctacaatggtaggaggaatagcatcgttagtgcgtaatggcaaagatggtaaattagttgcggcaaatgatccttggcaattagcaaatgctattattgaattggttaatgatcccgaacgaatgcgtttttattcaaaaaataccatgttatttgctcaaaatcgacacaatcctcgtaatattatagaacaattacttacatgttacaaggaaatcctatgaaagattcttattggaatagttaaaaaaaagatattattttaaatcccttctatcgctatttattagttatttaggtattgaaaaatattttgttatccatataatattataataaatgaataagagagtgatagcaattcatttgcctcagtttcacccgttcttggaaaatgatgagtggtggggtaaaggatttacagaatggacgaatgtgacgaaagcaaaacctcgttttttaggacattatcagcctcatttaccatccgatacaggattttatgatttgcgcttgcctgaagcaagggaaatgcaggccaatatggctcgtgaatatggtatttatggcttttgttattatcattattggtttaatggaaagcgattaatggatcgtcctgttaaggagattttagcgagtggacagccggattttccttttatgctttgttgggctaatgaaaattggagtagaaattgggatggtaaattccgtaatattcttatagaacagcattattcagaggaagatgatatagaacatatgcgttatttatgtagtaaagtttttcaagatactagatatatacgcatagatgggaaacccgtatttgctatatatcgttctaattttttccctaacatgaagcatacaattgatgtgtggcgtaaagttgcaaaagaggagtatgggatagaactatatttgatacgggtagagaatgagcctgattttggtcctaaatatcttgattgtggttttgattctgcaatggattttcagccattactgatgggagaatttaatgcatggtggaaaaatcttccatttagaataatgaatcatttatttaaaggaaaatatcaatggttcaataaacattttagttatgcttcgtatgtaaaatatcgaataaaaaaaccactggcggattataaatgttttccgtgtgtttcaccgggttgggataattctcctcgacgtaaaaaacctccctatatggcttttgtagggagtacacctgaattatttaagaagtggctaaaagataccttggttcgttttaaaccttttagtaaagaagagaatttggtttttattaatgcatggaatgagtgggcagaaggtaatcatttggaacctgatcaaaaatggggaagacggtatttggaagttacaaaagaagcaatacttgaaacaagtaaagaataaggttttatgagaatgccattagtgacggtgattatacctaattataatcatgcaaagtatttgaggcagcgtattgatactgtattaaatcaaacttatacttcatttgaagtcattattttagatgattgttcgacggataatagtaaagatataatcttatcttataaagataacccacatatttcaaatatcgttttaaatagcgaaaattcggggagcacgtttaaacaatggaacaaaggatttgaattagcaaaaggagattatatatggattgcggaaagtgatgattattgtgatttgaatctattggaattattaataacacaaatacaaaaatattctcaaagttccatagtatataccagttcacattttgttgatgcagaaggacattacataaagaaaataagaaagaaaggtgttgaaatagtaggagggagagtttttattatgaaacacatgacgatgggaaatgccattttaaatgccagttctgctattttctcaaaagaagcattgagtaagtgcaaattggattatactacttttaaagctggcggagatcgtttgttctggatctatttggcagaacaaggtcaagtgatacacttaaaggatgcgcataattattttagacaacatagtaaaaaagtaacatcgaatgcagcaaaatccggtttaggatttattgaatcattgaaaatttatgattatttaaaatcacatggatatttatatggatggaggaaacatttaactcatggctattatatgtggttgattggacatgtaaaagattatcagaatacacaagtaaaaaagaacatatatgatctctggaaaccgaaatgttcttatcctacattgaataaatatttgtttattcttcatcgagtatatacaaaactggtggatttattttaagcaattctcacaccatatttaaagctatgaaaatactaactatcacttgtcatgatgtatataatttcggtgcatcattgcaagcctatgctttacagcattatctggaagaattgggccatgaggtggagattattaattatcgtcccggctatttatataaaaaatatgattggaaatcatttacaagtaaaaagtttgataagcttaatagtttctttgtaacaaggtggatgtttcgtatagctaaatggtcttatttaagattttcgctaggacgcaaaaaatgttttgacgaattcacaaagaattatttgaagttgaccgataagacttattacacttttgaagaattaaagatgaatcctccttgtgctgatatcattatagccggaagtgaccaaatatggaatcctttatttcctaatggtaaagatcccagttattacattgattttgctttatcacaaacaaaacgcgtgtcgtatgctgctagtttttctgtagaatacatttctgatgcagataaagaatttgtaaaaggaatgttagctaaaatgaatcgtatttcagtaagagaatatcaaggagtggatatcctgaagtcgttagatattaaaaatggagtaaaagtattagatccggtctttcttcttgatagaaattattgggaaacatttatgcataaaggatcagaaaaggattatatcttaatttatgactttgagggaagtgatttgatgaagcgtgtcgctttatattttaaaaggaaaaaaggttggaagatttattctattaatgacgcattgcctcgattatatgcggataagaattttactaaggtaggaccacaggattttctttccttaatttataattgtagtatgttcttgtctaattcgtttcatggaactgcttttgctgtttattttaataaacctttttatgtatttgggctaaaaggtattagtttaaattcaagaatggagagcctgctgcgttctgtagatttaaaggatcgctttattacagaaaatattgatatagaaaaacttcatttaaattatgactttaataaggtgaatttattaatagaggaagagaaaaactattctaagcaattcttggattctgtcttgaaaactaactaaaaagattgtttgtatgactcttttatcaatctgtattccttgttatggacgagtggaatacgttaggaaaactttgaaaagtatttttatagataatgctgatgttccattagaaaagtatgaagttattatatcagataatgattctaatcaggcaattaaagtgttgacagaagaatttaagtatcctaatctgagatatttttataccaattgcgaaggattcatgaattcttactatgtgttgacttatgcacaaggagaattttttaaactgcataacagccaaactttatttagaaaagggagtttaagtaaaattatttccgagataaagaataatatagaaaataagactttaattttttatacaaatggattattgggaagtcgtaaaagtcaaacctattctaattttaatgattttatgtacaacctctcatattggtcttcatggagtaatgggtttaatatatggaaatcagaatttgataaaatagacaaaaatctgaagttaaataaattgtttcctcacacttccttgtttcttactcagcatcaggcaaaattattttgtataaatgataacctattatttgatgtacaaagaatacctaaacgagggggacataataaatttgaggcatttacaattgagtatccttcgttgctggatgaatgttgtaagaaagggcatatttcaacgaaatgtaaaaaacacatattatttggaattatggtacagtttcttccgtctttactttttaataaatatattattcgaatagaaacatttgatgatacgggctttagagacaacttgaagaaatattatccttcttatgcttattggcttgttttaatttctgttttaggtgttccttttagattgttctgtcgaaaattaaaaaataaaagatgaaagctaagatattctgtctgttttttcttatagtattagaatttatagtatgtccgcagaacggttggacacaagacaatactattcctatgattggtgcctactattttgacggttggtccggaaaaaataattctcaagaactatgggcacaagaagcccctactcatctgacagagaaactatataatgattataacgaacgtcaaccaatttgggggtggagaaatgatgatttagctataatggaacgtcaaatagatattgcttcccaaaatggcattacttttttcctgttttgctggtattggaaaaaagataagggggagatggatattaaaagtatagaaaatcatgcatcgcatactagtttaaagctctttatgaaagctcgcaataagcataaaatgaaattcgctttattaatagccaatcaccagggagctcggatagaaggggaggataattggttgaaagcaatggattatatggcggaaacatattttcaagatagtcaatatcttaaagttgaaaataagcctgtggtagcattctttaatgccaaagcagctgctccatcgcttaccaaaatgaatgactatttaaaaactaaaaattacgcaggactgttttcaatatcctgtaatgataaaagtaagaaatacagtgcaaattcatggtataatattcgtgaacatgagccgggatatgcttatagaaaagagtatgagaccttagcgaagaatgcggaagtaagttggtacacttatcctaaagagtacaatattattccattggtaatggcaggatgggatcagaggccatgggagaaacaagaaaaatctctttattatgtgaacaggacacctcaactctttaaacaacatcttaaaaatgcggtgcaatttgtgaatgaaagaagttgtaaacctaaaatgatattgatatatgcatggaatgaatatggcgagggcggatatatagcacctactgtaggagacccgaaaggaaagtatttaaaaatgattaaagaagtaattcgttagattatgaaaatagcatttatcagcacccgtggtatcccaaataactatggaggttttgaacagtttgccgaatatatttcagtggggttggctgcacgtgggcatgaggttgtggtatattcacctcatttccatccttataaaaaagacacttataaaggagtacgtataaagcatatctatagtcccgaaacttggatgggcagttcggtagggagtttcttttatgattttgcgtcattgaaagatgcattgaaaaaagagcatttcgatatcatttacgaagccggctatacaagtattgtacctgcttatatttggttcaatgtgaagaagatcaaatatcccatatttacgactaatatggatggcttggaatataagcgtactaaattcaacaaatgggtacagaaattcattttttgggaagaacgtactaccgtgaaacatagtcattatttgattgccgataacatgggaattcatgattattataaagagaagtataataaagaaagtaagttcttggcttatggagcagatatccatgaggattatgacatatcattattggctgagtttggtttgcaaccacgcaaatattatttattagtggcacgcttggaacctgaaaataatattgaaatggctatacaaggctttttagcatctggcgaaacggataaaaaggaacttattatagttggaaaaacgaatactcctcatggcaagtatttggtaggaaagtatacaggccaaccgggtattcgttttgtaggggggatttatgattttaaaaagttgaattcagtcagatactattcgtttgcttattttcatggacatagtgtgggtggtacgaatccttctttgctggaggcaatggcgtcaagttgttatatattggcacatgataatatctttaacagggcggttttgaaagataacgcacactattatgcttcttctcaagccgtaactaaactactgaattctatctatgaattaaatgaatcttgtcgtaataagtttattgaaaacaatttgcaagaaattcggaacgaatactcatgggaaagtttgatagataaacacgaaaaatatttttattggttactttctcagaaacaataaattgctacctttgttcatgatatcatcatgaataattaggttttggcaaaaaaagagtatagacaactttccgcacaagaggaaacggcattcatcctaatggtgttgttggatgaaggcaaaagcaatttgccttatagattgttgcgttgtttgacaagtgtacattttgccaatcaatattatttaaaaagactgttctccggataccgttctttaaactataatttttatcgtgataaatttgaaaaggaacaaggttgattgttgtttttcctgccttttgttttaatgaagaaaattttatttgtttttctgctgtgtatgatatggcaggaaggtttttctcagtatgtgtatggaaccaccggacttctgcacatgcctactgccgatatgcaacgggataagacattcctgttcggagcttcttatttggatgtggctgctactcctgcccattggaattatcatacgtttaattactacattaatatcaccatttttccttggctcgaaatcggatatacttgtaccttgcataaggcagaacatggtagtacttatttcccaccttccgtttgggggaaatattgtaaccaggaccgacagttttcagggcggttgcgtatatggaaagaagggtggtggaaagaatggactcctcagattgtattgggcgcgaatgatccaagtaccaatgatatattaggaaattctgataaagatgattatggcattggtggagtaggagagatgggtaatggacattggaaccgatattatatagctggtactaagcatttttatttcaaaaataggggagagctaggcattcatgttgcttatttatacaataaacggaaagactatcatttaaacggtccggctgttggagtaaattttcatttttatctatcgggtacaaatttctttgtgaaggcattaaacaatcttaatgtaatggctgaatacgacagtcgtaccataaactgtgggttaaaatatagtttttggaaagattatattaatgctgtggtagaaatgacagaatgtaagcatttgtcaggcggagtgatatttaaagtacatttaaaataacaaacactataacttattcgtatgaaaggaattgttctcgccggtggtagcggtacccgtctgtaccccatcaccaagggagtaagcaagcagcttctccccatctttgacaaaccgatgatttactaccctatttcagttttgatgctggcaggcatccgtgagattctgattatatccactccctatgatctgcccggctttaagcgtcttttgggcgatggatcagactatggtgtgaagttcgagtatgccgaacaaccttctcccgatggtcttgcacaagcctttattatcggagagaaattcattggtaatgattctgcatgtttggtattaggcgacaatatcttccatggtaacggtttcagttctcttcttcgtgaagccgtgcgtatggcggaagaagaacaaaaagctactgtattcggttactgggtgaacgatccggaacgttatggtgtggcagaatttgatgtggaaggtaactgcctgagcatcgaagaaaaaccggaacagcccaaatcaaattatgcagtggtgggcctctatttttatcccaacaaagtagtggaagtggccaagaacatcaaaccttccgcacgtggcgaactggaaataacgacagtgaaccagcgttttctggaagatcgtgaactgaaagtacagacgttgggacgcggttttgcctggctggatacgggaacgcatgattcattggcagaagcttcgacttatatagaagtcattgaaaaacgtcagggtttgaaagtggcttgtctggaaggaattgcttatcgcaaaggctggataacggcagataagatgcgtgaccttgccaaaccgatgctgaaaaaccaatacggtcagtatctgctcaaagtgattgatgaagtggaacgtacaggcaaagaaaatctagattaagatatggaggttataaaaacaggaatagaaggtgtggtggtcattgaaccgcgcatctttaaagatgaaagaggctatttctttgaatctttttctcaacgggagtttaatgaaaaggtgatgcctgtcaattttgtacaggataatgagagtatgtcatcgtatggcgtgatgcgtgggttgcattttcagcaaatgccttatactcagagcaagctggtgcgttgtgtaaaaggtgccgtacttgatgtggcggtagacatccgcaagggaagtcctacatacgggcagcatgttgcggtggaattgacggaggaaaaccatctccaattctttatcccccgtggatttgcccatggttttgccgtattgagtgaaacagcggtttttcaatataagtgcgataacttctatgcaccgcaagctgatggtggcattcagctgcgcgatgaaagtctgggtattgattggaaaatacccgttgccgaggccattttaagtgagaaggatttgaaacatcctttgttgaaagactatgactctccgtttgactacactattaatctatacgaatgatgaatatacttgttacaggtgccaatggtcaacttggcaatgagatgcgcagggtgtcattagacagccggaatcgttatctctttacagatgtaaatgaactggatatcacagatgcgacagctgtccgtaatatgttgaaaaaggagcagatagatgtgattgtaaattgtgctgcttatacgaatgtagacagggcggaagatgattttgctatggctgatttgctgaataacaaagctgtggagaatttggctgttgctgccgcagaaacaggtgccacgcttattcatgtatctacagactatgtgttccgaggggataaaaacattccttgccgtgagtcttgggaaactgatccgttgggtgtctatggaaaaaccaaactggcgggcgaacagtctttggtaaaagcaggatgtaaatatcttattttccgcacagcttggctttactcgcctttcggtaagaacttcgtgaaaaccatgcggcaattgacttcaacaaaagattcactgaaagtggtttttgatcaagtaggcactcctacttatgccggagatttggctgctttgatctataacataatcgaagagaacttgctggatcgtcaaggtgtctatcatttcagcaatgaaggggtatgttcttggtatgattttgcgaaggaaatttgtgaattgagcggaaataattgtgacatacagccttgtcacagcgatgagttccccagtaaggtggaacgtcctcatttttcggtgctggataaaacaaaagtgaaggaaacttttggtatcactatcccttattggaaagattctctaaagaaatgtatgctggaattggaaactcaacaataactaattaaaacaatattttaaattatggattcattcaaacgcaatataatcattaccggtggtgccggttttatcggcagccatgtggtacgtctttttgtaaacaagtatccggaataccgcattataaacttggataaactgacttatgccggtaatctggccaatttgaaggatatagaggacaaaccgaactatatttttgtaaaggcggatatttgtgattttggaaccattcaggaattattggtgcgatatcaagtggatggtattatccatcttgccgccgagagtcatgtggacagaagtatcaaagatccgtttacttttgcacaaaccaatgtgatgggtacattggctttgcttcaggcagccaagttgtattgggaatccctgccggaaaagtatgaggggaaacgtttctatcatatttccaccgatgaagtatatggggcattggaatttgacgggaccttcttcacggaggaaaccaaatatcagcctcatagtccgtattctgcaagtaaggcaagtagtgatcactttgttcgtgcttttcatgacacatatggtatgcctaccgttgtaacaaactgttctaacaattatggtccttatcagtttccggaaaaattgattccgctttttatcaacaatatacgtcatggaaaaccattgccggtatatggtaggggagagaacgtacgcgactggttgtatgttgtggatcatgcccgtgctattgatcttatttttcatcagggcagaacagcggatacatataatatcggtggtttcaatgaatggaagaatatagatttgataaaagtaataatcaaaaccgtggatcgtttgttgggaaatccggaaggcacttcagagtgtctgataacttatgtgaccgaccgcaaaggtcatgatctccgctatgcgattgacagcaataaactgaaacacgaattaggatgggagcctagtttgcaatttgaagaaggtatagagagaacggtccgttggtatttggacaatcaggaatggatggatcatattaccagtggcgaatatgaaaaatattatgagtcgatgtataagaacagataatgagaatcccagttggggataatacggcatacatctttaaacttaccccccataccactatgaaagacaaattagcatcctacaaccacttgatcgagacctttgtgattgtcaccgagacctttctttgcggtctgctattcctgcttttcagcaagctgtccaatgagatgcagtgggatagcctgcaggttggtggaaccaccgttctgcaagtcatgcttacactgatgttatgttacgccctttgcgccatccattcaggagtagtgcttcaccggaggaaagtgcattcccttcagatatggaaacgtgtgttcgagaatatgttcctgtttgtcctcctgggcggtctggtcctttctgtaggaaagtatgcggatatagcctccctgttcatgctggagtaccttttcctcctgtttctgtgtcttgtttcgttccgtttcactcttcgtcttctcatcaggctttaccgtatgagcaagaaacatacgcgttttgtagtactggtaggaagtacggacaacaacctggaaatctaccatgagatgtcgggcagtgaagatacaggttattcggtcgtgggctattttgacggtcaggcgaatcctgctttcccggtagaatgtccgtatttgggccagccggcgcaggtacaggaatatctggagaaacatgattatgtacattacctgttctgctgcctgccctcaaaagacagagaggtcatcgtttctctgattgattactgcgagaaccatctggtacatttcttcagtgtgcccaatgtgcgcaattatctccaccaccgtatgtcgttcaacatcatggggaacgtcccttacctgggccttcgccccgatcccttaagttggccggggaaccgcctgctgaaaagaacctttgacatagtagtctcatcggtgttcctttgtacgttttttccggttattctgattgtggtggcgatagtgaccggattgaccatgcccggcccgctgttcttccgccagaaacggaacgggctgaacggcagggagttttattgttacaagttccgcagtatgaaagtaaatgcagatgccgacaggatacaggccacggagcatgatccccgcaagacgcgctggggcaatataatgcgtaagacgaatatagatgagctgccccagtttatcaatgtgctgttgggggatatgagtatcgtggggcctcgtcctcacatgcttctccatacgcaggaatattcaaggctgatcaataaatatatggtgcggcattttgtgaaaccgggtataacgggatggagtcaggttacgggtttccgtggggaaacgaaggaactaaaagacatggagggccgtatccgtggtgatatctggtatttggagcactggagcttcggtctggacctttacatcatgtacaggacggtggcgaatgtcttccgtggcgagaagaatgcctattagtaaaacgggctgttcttaacgatccttctcgatgagggtccttagtaatttagcagttaaaaaactttgtttttgcagcctgttatttccgtctgccggccggaaatggaacatagccggcactaatgttagatcagaacccttgtcctttgtgaaaagtgcagggggagctccgggaacgagagcgcttgttcccggagctttaataataaagaagattatccgattaggatttattcagctttaaaaataaacgcggattatacaataacccgtaacaggaaggattttttattttctgatattactatatttactcctaaagaatttttatctatatgatagtctgtttcggtgtgtcggtaccggccggatgatcttagtaaaaaatttccctctgccagtagtatcactctctacttgagagctgaaacgaacactggcaaagggaaaccttggaaaaagaaattacctttccaaatatccgaacaccccttccgcgtcaaaacacggacaagccttcgggatgcttccgctcatatccctatgtccccttatccgggcaccgggaaaaagctttgccagacgcatcagcaacaaggtaagctgttctgtctgctctgcggtccgggtgtctgccggatgtccgtccgcatccagaccgccctcgtagcagatgccgatgctgcaacggttccagggacggcagtgtgcccccacttccagcagtttgcggtgctgggtgatggtgccgtcgcgacggatatagaagtggtaacctacagtccggaaaccacgggtcttatggtcacgaagtaattgctcggcagtatagtctttgtcacaacgtgtggcgctacagtggaggatgaggtatcgcactgattcgcgtccttgcatcagcggtccgtcctctacggtgaggagttggcgttcgtttttcatttcttcctcaccgattatcattgggaatgtttcttgtatcataataaattgagaattggaaaatgttgtgtttgttctttagatgagggatgcgcaactggtaatgcccaaagcggtgagtgccgcgatggctgcctggataactgcccggaggatttgtgtccaggtgattttcttggattcgtggttggattcattcatggaaatatctgttttttgtcagtttaaaatgcgaatggaacaaaaggaggttacggaactggcggacggacacgggggagtgaaagaagagtccgtgtcgcccgtgttccataatcacatcatgctatctctgtggagcggaacaagccggtcagctattttcgtctgccggttcgccggaggcggctggaatgcgggaggcgtcagcgtcgtcagcggcaatgccgacggcagaagaattgcccgtcaggtctaccgtagtctttccggccttcaatgccttcactacttcggcggctgccttgcgcgtgggaaccagttggaattcggcatcttggcgcaggttgttgaaacggacgcccggagcccacagtacgttcacctcggtgatgttctccacagtgaactctgccatcgaatgggcgccgaggcttcggatactgttcgaaaatacgcccagatcgcccatctgtatctgctgtccgttcaacaactgctcgcgcaggcagtccacggcaagaataaggatggcttggatatcggcgcgcgagtatacacatccgtggctggcaatgtggtaacagaacttgtccagtgtcattacttgtgagtactgggcgttggcatacgccttcttggccgcgtctttgtcggtggggttaccacgcatgcaggtgctgtagttgatcatgataaatagggttttaagagatgaaaaataaaaaatgaatttcgtcagtgaagagggagaatactttacttttcttgcggattgcacgtaggtaacgtgtaaggctgaaggttagtaacgtatggggttacatgttagtaacatgctaggccgaaggttagtaacgtatcggctccctcattgttgacattgcaaagataggtactgtgaaatgcgtgctgacgctttatgacaccttgtggcactttatggctttcatcctgttccaaagagcttgcagggctatccggggctgcccagatgccggttgatcagtgtcacttggcggctcgtgaagactttttgcgaggtatggtaacccgttgcggataactcttccatcaaagggggacagccgtttatccacctcatcagatgccgggtggctatccggggatttgaaccgggaaaatagagcagagccaggctaccttttgtcatggatgggaaataaaggaaatctttcatatttatacattttaaattcaggaatcttgcaaacttgcagaacttgcactctctctcacacccacacacgtacgtgtgtgcatgcgcgcgttgaattcgtattcgccacgccccactttgaccagctgtccgcgttcggtcatacgtttcagcagcgagtccaccgagcctgccggaactcctacctgttctcctttgtcgatggcttcgttgcgggtgaagcgcaggggaaggcagtcgaacagggtttcgggagtcatgttcgccgatggtgcggtgggggttcctgcgggcaggagcgagagaatgtggcatgcatggcggtacagaggttccaccagggccagcacggcataaaagtcgtcggtgcggatggagaggttgaattgcggtacgattccgtctgctatgttttcttgtggaatatgggccgacggggtcagtccgggacagttcagcagggtacgcacgatattttcctgtggttcaccgctcctttcgcctcccggcagcagggattccagagagcgcagcagggcgataatgcttatgatgcggaagatattgatggcaatacgggttacggcgcttttcatctggttgccgtgaatggcggaggctcgtccgaatacgcgggcaaagtggaagttgaatatctctttttgctcgtgggtgagcttcatgttgatgttgctcaccgaagcggtgatggcgtccagcacttctttccattgtgccccccattccaggaaacgggagtcatagtctgtatccgcttcgttgaactggtcttcccattcttcaatggcaggcatatagtagaacagctggcgagagaacaatccgttttcggccgatgggataaggggcttgatttgtgcaggcgtgccgctgagaagtacgcagaggaacgtgacgttacattcgcggtattcgtgattggtgcaccggttgtaggccagccggtcatggtcgaaacatttccggaggaggtcgctccagtgtccgtggtcgcctccaatggcggtgctcacggtgtcggcctcggtttcgcatatcagtcctacgcctccggagtccatcaggttttcctgtatgcctgtaccggtattgtcgccggctatgaggagcattttcagctggggctgttcgggttcgggggtatttgccttttccttccccaaagtgtcccatttggtcttttccatgcggtaggtctttattttttcccggtaggtgtccagcagcgcgttgtgtatgggttctgccaaacggcgtacccaggtcagcgcacctttgccggaagcgggaggcgcggtgacgaacacttgcagacagggatacttgtgctttcgtccgtacacaaaacttaccagtttgttgagagtgcttcccagcacggttgccgcacccagcagcaggatatcccgttgggcgggagagttaccgcagtctatgattccttgcaggaaggcgggccagcggtagtcggggaaagagggaagtcgggcagggaggatggtcttggacacgccgtcggacaggggggaggctgggtccgtgaaaacggcatcgggcggagtcccgtcggaagcatccggatgggcattataggatgcgcgcgcacgtgtgtgggtgtggagagactgcaagttctgcaagtttgcaagtttcgggtccattttcaccccggccacctctgccagatggaagacggttcccagggaatttctgcctgttcctttggtcagggcatgtccgtacagtttgtctgcttcatcgtggtggtacttttcggatatgcggcagatgcggtggaaccgggtgcgtccttcttctccgcaactgttggctatggcaaaggccagcggcatatattcctgataggtgggggccacattgactcccgcttgttcgatggctgttaccagctgttccaagatagaaatagaatcgttcattttttaatatttatggttattgattttcgcttctccgtcgtgcgacagaaaacaggctctggacaagtcggcattggccctgtccactttcagctcgtatttccattccagatactcccatgcggtgtgcagggcattgtcgaaggattcttccacgctcaggaaagggtttatgcggtaagggataaacagttttactccctggtttccggggctgacaaaggaaagtacggggtgcagcacttcatcggcaaagaggcggtcgcgccacattgccgcttcttcggtggaagccagttcgtcaatatctatgacaaagaggcccgaaggaacttgcatgcattgctctttgcagtaagagaagatacctgccggagtgacatacggtaaaagggtctgtttattctttcggaacacttgcttgtctccgagtccggctctgactttacgcgtcagttcttccagttgcggattggtgctgatgtaggtatgaagccctgccacactgcatatacatgtgggtattttattggtgacgggtgcattgaaaaatgacatgatgtattctttcataaaagaaattgattttgatttatctgcacaaatatacgggtagggaatgacgtatggaaatcggttcataaccgtttactatctgtttactattggtgcatgctattgattatatattgataaaatatggattttgattaacgatctgttgataataattaaagaatagagaaaagaaatagtatatgaatgaaaaacctgatatgatgataaatatttatggcggaaacaatctgattgcccctgtggcgtcttccgccattcagaacttttatggcgaccggggtgatgaggccgccgaccaaccggaagattctgagaaaacggagagtacagaaagtgtgacggatgagaagccggcacaggagccggcggaactgtcggatgatgaattttacgtatcggtctatatacccgatataaaggtgatgagggcttacaagatactttggggagagtgtaccacggcacgcgaactggcggtggtggtaggaaagatgctggccgatgagaactgtaggaatgtagacaaacacacggtggtgaaagcggctttcatcaagtcgttgctaccttttgccaaacggcttgtgtcgggcggtacgatagccaatatacgggcgcagattaataatatgctggctagtaaataattttttcagttatcctcttactccattggcacgttagcaaatcggcaaattatttatgttgcgggattatcagatagagatgaaaacacgtctgatggaagcgtggaaagctcaccggagtgtgatggtgcagatgcctaccggtacgggcaagacacatttgctggcatctgtggtcagtgagttcgtgtcttctgccggcagcggggtatggcttattgcccatcgtagggaactggtggcgcaaatggaggaaacgctggctaaatatggtatccggagggaggatactccggtcagggtgatggctgtccaatggctgtcccggcactggaatgaggcgggtgatgctccgggactgattgtgatagacgaggctcatcatgccttggccgcttcttacacggagatgtggaagcgttatcctgccgcaaagaaactgggtgtgactgccacaccttgccgcctgaaccgtagggggttcacggaactgttcgaggtactggttacttcgtggagtattgccgagtttattgaaaaaggcgtgttgtctgtgttcgattatgtatccatccgtcccggcagcgaggagcagcggctcattgacggtctggagaaacggggggccgatggggattatcaggtgaaagagatggatgcggtactgaacaggcgtcccggtatcgagcgcctgtaccgcagtgtcaggcagtttgcttccggcaagaaggggatggtgtatgccatcagcattgaacatgcccggcggatagcggagtattacagcaggcggggagtgaatgcggtggctgtggacagcaagactcctgctatggagcgtaagcggatggtggaggagttcagacatggaaaaatcgaggtgctggtgaatgtggatgtattcagcgaggggttcgactgtcccgatgtggagtttgtacaactggcccgtcctactttgtcactggctaaatatttgcagcaggtagggcgcggattgcggagatcggagggcaaggaggcgtgtatgctgatagacaatgtggggctgtaccgcattttcgggcttcctacacagcgatggaactgggatgctatgttccggggacggatggcgggaaaggggagtttgcccggacggatgaactgtgatgcttccgttaccgcttttccggtggtggaaaggccggctgaagccggtggggacttggtggtggttatggagcacgggcgtttgctttcttccatcagagagcaggctttgccggatgagaaggagcagtcaccgtcatgcaggctgagggcatttgtagataaggaaacaggtctttggggattggaaaagggagatgagatgttgccggacgcttcgtttaaagaggttttgagtatcaaaggacgttttgccgtggggaggcttcggaacgggtgtgtccgggtactggatgatacgggggctttggtggccgaaccggggcattgccgtgaggtgaggtttctgaaagatgatttgttgcaagtccgtcatgccgggaattcggtgtcttatgtggatttacggaacggccggtgttattctgtccgcccgcgtgtcctcagatacgggagcatagaattgttacaggcgaaccgtacttattacagcaggacaaggcaggtgtatgccaatacatgcgggttgccttcttcgtccatcgtgtggatggggttttatgtgaagatgtacgatggcagagtgccttcccgatgccgccgcatggaagatggaggcttttgttgtgaaccgcaggtttgtctgttggagggggatgaggagcgtgcttattacctgagcggacggttgccggatcaaagtattgtggtgatggatgaggagggacggtattaccatgtggagaaagggcatggaaagcgttatgtggcctgtaaccgtccgtcggaccggagtgaggattttgatgaggcggtggcattgctccgaagacaggcggacgagcgtgtggagaaacgcttgcgtgaggagaagtgcgagtatgaacggaaacggcagcgtataatcagcaggagtgtggaggccgtaccttttcaaataggagtgaaatgggggctgaggacagcggagcggattttgattccacctgtctatcggaggatattgcatccggtgggtggttattgcgcctatcaggacagttcctgccagtggggggtactggctgtagatggaaggatcattatccgggcccggtatatggaagtggagatagacagggatggaacggcgcgtcttactttggttccggggaagatggaaacggtgaagctgacggactgataggataaaaagcaggggataactttttgtcaaaccgatatttggcgatggaatacatatcattatgaaaagttttgtaactttgcatccgatttttaaaaaggagatattgatatggaattacctgatgacccgatgatgcttttcagcatggtgaatatgaaacttcgtgactgctatcattcgctggacgagctttgtgatgatatgaatgtagacaaggagctgttggtgaaaaaactgaaggcggccggatttgagtatagtaaggaaaacaacaagttttggtagatagagggatcagcccgttccggaagaatgtgtggaacgggctgatttttttattgaggtacctattgattatttttgtataagtcctgtttccggtattgcaacagggatgttccggtatgtcgcttgaagaaacgtcttaaggtggcaagattggcaaaccgggttctttgaacgatttcctgtatgctgatggatggattctccaatagtgcgtaaatctcttgcagggtataatgtataatccattctttgggggattttccgcttaccagggtcaaggcttcagtcaggtatttggaggaaacatgcaacttttcggcatagaacgccacttctttgttttctttgtaatgctttaacagcaaatccagaaaaaagtatccgatttcttctttatgcaaggtggtgactttatgttcttttaccgtgctgtaatagtctgcataaagttccagaaaaggtaatttcagcagattggtaatagattcttttgtaaataaataagttggcgaagtggctctgttgtataataaccggaaatagatggagaactgttccgatttctcttgggatagcgaatagacgcagtgggtctgggtgtaggtatgaaaaccggtcggaaaacgtttgatacttccattgatcacgtcataaaaaaggacatttgaaaaagtacaatagtcgatggtgaaagtcgggctggattttataaatgaaaccaggaatcccggcatgaaaataagaatgtcgtttgcgcaaataacatatttccggaggccaacctggatctcggcatttccttcggtacatatacccaaaactcctgccggcatataagaggggtatttgctgaaaggcactgtgtgcgcatccatataaatactgaaatcttggtcggacagtccttctttggtatcctgtggttttgggttattatataacatactttgtatcaaatctagcttcacaaaattagaatttaatgatacattccaccgggagtagtggacataagggaaaataaaacggaaaaaaactacgtgtatttgatttttttaatatactgataggaaaacaatttgagctttccgtaagttgtaggagaacacggaaaattattcttttttacagaaagaagggtgaattcaaaaagaccgtttgattggtttttgaattcaccctttatgaatggatcggagttatttttgcgccagtaatttggctatggcacggtcgggtttcccggtttctgtcaggggaagtttgaataccggaacaaaacgtttgggacgccagtagggaggtaattgatgtgtgcaggtctgttctatgtcgtcgggcagttgtccttcggcaagcagtacaatgatttctccgaatttttcgtcgggggcggaggtgatcaggaaaggaacggacaggtgttctttcaatgcggcctctacttgttctatctgcacttttactcctcctgtattgatcgtgttgtcttttctgcctagaatgcggaattggttctgtccgtttatctcggctatgtcattggtcaccagttctttttcgcaaatttcgggagcgtatatcaccaaggtgttttctttactcagacggatctgtatgctctcgaaaggggtgtaccagtctgaagcttcaggaccgttcagtctgcgtagggcaatgtgtgacaaggtttcggtcatgccgtaggtagaccatacggcatgggggaaatcttttaacgcagcgttcagttgggagtcgataggaccgcctccgataatgaggtgtctgatttgttgcaatatcgctttctcttcgggaacttgcagtgagttatagacttgcatggggatcatggcggcaaagacgggtgcttttgtcaggtcttttaaaggatgtccggagggggtgacaggcagcaagtccagtcccgctaccaaggcacgtattaccaccatttttccggcaatgtattgcaagggcatacaaagcagggcggaatcttctttttgcagtccgaggaaggaacaggtgaggcaggcgctttccatcatgcgttctttttctacatacagttccttgggtttgccggtggagcctgaagtatgtaccggcagggtgtctgccgggtcaaaccattcggaaagaaaggagagaagttcctgccggaagcttcggttgtcggcagggatattcattcttaccatttcaatttcccagttggagtaggggatgctttctatcagaatggtctgtttgtttctattggtgcagaattttgtcattgtttcagccagtttagtaagtcgggttcttgttcttcggggtggaaccaaaggcagtccccttcgatgtgaagcggatagtctatattgtcggtaaacagcaagccggtacctagtccttgggggagggcgggctgcaaggtggcacaccattgtgcgatggcattcagtccgatattggactccagagcggaagtgacccatgagccgatgcctctttcagccgccagttccatccattcttcggagccgctgattcctccgtgcagagaaggtttcaggataatgtactgaggacggatggtttccagcaattctattttccggtcgcgccggttgatgcctatcagctcttcatccagtgcaatgggaaagggggtggcggcacagagccgggccatttcattccattgccccgcacggatgggctgttcgatggaatggagctggaattcggaaagacgatgtaacttttcgagggcatcggcaggagagaaagcaccgttggcatctacacgcagttcgatttgggctggggtgaaatgccggcggatgtgcgccagcagctccagttccttttcaaagtcgatggcgcctattttgagtttgatgcagcggaagccttgctgcatcttttccccgatgcgccggtacatctcgtcaaagtttcccatccagatgagtccgttgatggggatgccctctttgcctttgctgaacggggtgtgccagaattgcaggctgcgtgcccggaaatgcagcagggcggtttccattccgaacaggatggacggatagggaagcaaggcttcccggtctatttccccgttcttttccaggttcttgcaggcagtggccaacacctcgtcgtatgaggggatatcgtcacaactcagggcagggagaggggcgcattcacccacgccatagtggcggctgccggtgtcggtgaggaggatgtaccatacattccgggtggtatatactcctctggaagtacctgccggttgcttgaagtgtaattgtttttttataattcgggtttggaacattcttattagtgattagtggttaatgggaagcaaggaggactattgggttgtcctccaccggaaaaatgaaccactgattatgggaacttcggataatcctggaaccgtggcttgcgtttttccaaaaatgcctttcctccttcctgtgcttcctctgtcatgtaatacagcatggtggcatctccggcaagttcttgtatgccggcttgtccgtccagttcggcattcagtccggctttgatcatacgaagagcgagcgggctgtgctccatcatcttttctgcccatgccacggtttcgtcttccaggcggtcgaaaggaacgactgtattgactaatcccatttccagtgcttcctgtgcggagtattgacggcaaaggaaccatatttcacgggctttcttctgccctacgatgcgtgccagataggaagagccgaatccggcgtcgaagctgcctaccttgggacctgtctgtccgaaaatggcattctctgaggcaatggtcagatcgcataccacatgcagcacatgaccgccgccgatggcgtaaccgtttaccatggcgatgaccggtttaggcagtgaccggatttgcttttgtacgtccagcacattcagacggggaactccatctgtgccgatatagccgccatgcccctttacgtgcatatctcccccgctgcagaaggctttgtcgcctgctccggtcagaaccactacattgatatcctggcactcgcggcagtaatacagggcgtcgctgatttccgaagtggtggtgggggtgaacgcgttgcggtaacgcggacggttgatggtgattttcgctattccgttgtaaaagtcaaacagaatatcctgatattctttgatggttttccattctcttgtttccattattcatttttatttttaagtccgtgataatattctcttaacagggtggtgtctttttccttgtcggtaaacacctccagcagcatgggttgcatccgtgtctcgggtgaggtgaatggctgcatcgcttcttccagctcttcttctccggtcactttcatgtaaataaagccgcgttcttccgcccagcctttggcggtggtgtaatgctcggctgtgataaactccctggaacggcttgatttgtccattccaggcagggtatggaatatttctcctccttcgttattcagtaacaggatgcggatgttggcaccgtaattttgattccacagtgcgttcatgtcatagaagaagctcaagtcgcctatgatgatgaaattcagcttgctggaagcggcggcataaccgatggcggtggacagggagccttctatgccgttcactccccggttgcaacagatttccacctggggaggaactgtaaataactgtgcatagcgcacggtggagctgtttgccagatgcagggcacagggttcgggcagtgcccggatgagttttccgataacggagatttcggaataagcaaggtccggcatcggaatggttttgcaatagttttcccacatcagcggataatgggtaggtttgttgtccagcaggaaagctattttttccaagaactcaaacggatccatctcgatgacggtggtcaggcaaccgtataaatcggctatcttcccgtcggcggcaacatgccagtgttcgcgcgggggatgattgcgcaggtatttcttcaattgtttggatacgatgtgtccgccgtaggtaatcagtatttcgggggccatgtcttcctggcgttccggtgtcatggaataaacggcggcgtcgaaattcttgataggaatgccggggatggtctggttgcctagatgttccgtcagccaggcgaaatgtttataaagcggtttcacatattttttctcgaacaggtaaatcagattcatctggcctaccacaaccatgcgcttgttgtacttgttcagccgttcgatcagttccttatagtcacggtcgtacacgctcagtccctgataacgggtgatgacacgtacttcgggaagtgttttggcggtgaagcggtaaatgggttcggaaatgggtacattgatatgtacaggccctttgccgtggtgggtggtttccagtatggcttcgttgataaggcggttgcaaaaccattcgtcttcctcagtatgtacttcgggcaggttgacagacatcttgactaacgttccgaacacatggggctggggcagggtttgtccgtccatttgtcctatccaggcagcggggcggtcggcggaaatgacaatcagaggtacttgttggtaaaaggcttcggctacggcagggtgcaggttcagcagggccgaaccggaagtgcagcatactgcggcagggcctcccccttgtaaagataggccgatggcaaaaaaaccggcactgcgttcatcggttacagaataacaagtgaagtcctctatattggccagagtatgtacgatggcagcattacggctgccgggacaaagcactattttccgcacaccgtgcgctttgagaagtgccaccaactgaagtatgttctttttgtctgaatacattattcttctactttaattgtttccatttatttacttataaagtcaggatgaaggatgctccgcatcgtattcatcttgtctcccgtttccatccattccgattctacttccgaggaagccagtattcctcctcctgcatacaggatggcttcacccggctttatttccatgcagcgcagattgacgtagatatcggtatgcccctctgtgtccagccagccggtgaacccggaataataactgcggtcgtacccttcattgtccggaataaaccggaaagcctcctctttgggcaggccgcagacggcgggagtgggatggagttcttgcaataaatcgcctatatggtctgtatttttcaacaagaaataaaaatcggtcttgaggtgtaccaattgtccggcacgggcggtataaggacctttctccgtcatcttgttgccgaatcttttggcgatccggcggatgtaatcagccacatagccctgctcttcccggttcttcctgtcccagtctgtcggcatcacttcattctgcatcggcatggtaccggccagggccacggtgtgccattctttgccgtgtccgcttaataagatttccggtgtgctgcccagccaggttccggaagcaggggtgtggcataggtaaatcatcatgcgcggatagttgttgcaggcccggacaaaagcgccgagtggtgaaaaatcatctccgatatgtctggcggaagaacgtgacagaaccagtttctggaaccgcttctcttgtaagggagtgatgaaacgcccgaatgcgcgggtatattgttctttatccgtttcttcggaaacaaaaggggagagttcactctgccggcttttgcaggtgagcagggcatccgcacattccagtgaagacagtgcttcgctgatttcgctccagtcgtatgcggtgacatccggacggataagtaccaagggatgttcctccgatatctggaaaggagccatgacaaatcctttctttccattcagttcctgaatgtccgctaattgttccacatcgcccgaggtttgcaataccaggtagcattcgtctgtccaaggtaaccggtagagggcgaaaccgaggcggctgtgtgtcaggcaatccaataatttttgcgtatgtatatctggtagattcatttctttttcagtatgaaattaacgacacgaacagtagaaaccagttgtccttgtggagtggtgatatctatattccatatatgcgaggatctgccgcggtgaatcagtttgccggtggcgaatactttgcctccgacgggcacggccgacagatgatttccacttacttgtactccgcaggcatattcgtcttcccggcatagcgacgtagagccatgccctgccacaatctcggccagagccagtgacgcgccgccgttcaacataccaaagggttgtgaagtacgatggtctacaggcatttcggcatgtaccgcatcctcggtggagggtagaaaccggatacccagatgttccgccatcgaattcgaataatcaggtttgcaggttgtttcttccatcatttgtatgtctgttcttttctataaggctacaaaaatacataaattttagatgaaaaggtgttgtatgtatgtcttttactaacaaaaacatttatttaaattcaattgtttgggagctttttcgatacttataatatatgatgccgatgacgtccgctataaaccatccgataggaatagaccaccagattccgatgaccccgatggcaggaatgccggcaagccaataggaaagggctacacgggttcccaacgataccactgtgagcactacggacattcccggcatacggatggcacgataatatccgtataacaggaacaaaatcccgattccgcaataaaacgctccctcgatgcgtaaataactgataccgatgttcagaatttccgtttcgtggggacggacaaaaatcagcatcaatggtttggcgaataaaaagaccagaatggaaatgaccagagagaagagaacggtggtaatcaaggcacttttcactcctttgcggatccgttcctcttttctcgctccgaagttctgggcaataaaggtggaaaaggcatttccgaattcctgtaccggcatataggcaaacgagtctatttttattgctgccgcaaaggcggccatgactacagtgccaaaactgttgaccaatccttgtaccatgagaatgcccagattcattaccgattgttgtacacaggtcagtgcggagaacgaagtgatctctttcaggcagtgacggtcgaaatgcaggtcgttgcggtgtaatctcagttcggggtatttcacgtaggcatatcccataattcccaaagcggatactccctgtgcggctaccgtggcgatggctgctcccttgattccccaatccaactgcaagataaagaacaaatccagcccgatgttcagtacaacggaaaccgccagaaaccaaagaggagtgacggcatctcctatggcacgcagcaatgccgcatagaaattatagataaaggtaaagccgattccccaaaagataatccacaagtaatcatacatcataccataaatatctttgggaatctgcaatatcctgaggatgggatgaatccagacgaaaaccgctatatttagaatcaatgttactgtgccgatcagcaggacggatacatagatgctacggcgtagggaatccgtccgtccggctccatattgcaaggaaaaaacggttccgcttcccatggacaatcccagcaggatggaaataaggaaaaccatcagcgtgtaggcggaaccgacggcggccaatgcgccggaacctatacattgtcctacaatcagcgtgtcggctatgttgtaacactgttgtagcagtgagcctataatcataggtaaggtaaaacgtagcagagtgccggtgatgcctccctgcgtcaagtctattttagataacatgatgtgcgtctgttcgattcaatttcttatttattttgaaatttattgcgaaggtagggaataaaatatcaaacaacaatagtgattgtctatttaatacccggaatgttctttctccttaaaaagagttaacttgataatattttccataggaaactttttattataagaaatatcatgtatgtttgcataaagtttccattggaaaatattaaatcaaataaaatagttcgattatgaagtatatagtaataggaggcgtagcaggaggtgcaactgctgccgcacgtatcagaagaaacacggaacaggcggaaatcattttgttcgagaagggagaatacatttcgtatgccaattgtggtctgccttattatataggaggtgtgattgcggagcgggaaaaattgtttgtacagactccggaggctttcgggaaacgttttaacatagatgtgcgtacccggtccgaggtaatagccatccactctgccgataagacagtggatattcgtacttccgacgggaaaacttatacggagagttatgacaaattattgctttctccgggtgcgtcgcctgttcgtcctcccttgccgggcattgacaatgaaggaatttttaccctacgtaatgtgaatgataccgatgctatcaagagttacttgcagcagcataaggtgaaacgggcggtaatcatcggggccggattcatcgggttggagatggcggagaatctgcaggaagccggtgcggaagtggcggttgtagagatggcaaatcaagtcatggctcctattgatttctctatggcttctttggtgcacgagcatttgttgcagaaaggagtgcatctctacctggaaaaggcggtggcttctttcgagcgcacggtcaacggactggaggttatttttaaatcgggcgaaaggctgcctgccgatatggtgttgttatccatcggggtacgtcccaatacctcattggcgacagaggccggactggagataggggagatgcgcagcattaaggtgaacgattacttgcagacttccgacgagcatatttatgcggtgggcgacgctatcgagttccgtcatccgctgactgatagaccgtggttgaattatctggctggtccggccaaccgtcaggcgcgtattgtggcagataacatggtttttggaaataaggttacatacgaaggggctgtcggtacttccattgccaaaatttttgatatgactgtcgctgcttcaggccttccggcaaagcggttgaaacaggcaggcattgattatttgtcggcaaccatccattccggttcccatgcgggatattatcccgacgctttacagatgtccattaaaataaccttctctcctgtgaacgggaaattacttggagcgcagattgtggggtataacggagtggacaaacgtattgacgaattctcgcaagtgattaagcataacggaactgtatatgacttgatgactttggagcaggcatacgctcctcctttctcttcggctaaagatcctgtagcagtagccggatatgtagccggaaatatactgagcggaaagatgaagcctctttattggcgcgagttgcaggctgccgatttgagtaaagttacgttggttgatgtccgtactcccgatgaatttgcactcggtgctttgaagggggctgtcaatattcctttggatgatatgcgcgaaaggatgaaagagattcctcaggataagccggtctatttgtattgtggagtggggttgagagggtatctggcttctaatatattgttacagaatggctttggggaagtaaggaatttaataggaggtttgaaactgtataaagcggcaacggctcctctgcccaagccgaaggagttctcaaattccggatcttcaagttctgattcttcaaaagttgatcattctgaacacagtaaagattctgctgaagcttatactattgcctcttccgtcattccttctatgaaagcaataaaagtggatgcttgtggcatatcttgtcccggtcctatcatgaagctgaagaagagtatggaagaactggcggacggcgaacgtctggagattgtcgctacggatgccggtttcccccgcgatgccgaagcatggtgccagactaccgggaaccgttttgtctcagtaaagtcaggagcaggaaagtatgaggtaattgttgagaaaagtactccgcaatcttcttcctcggaggtttgccgggaggataaagggaaaacttttattctgttcagtgacgacctggacaaagttttagctacttttgtactcgcaaacggtgcggcggctacgggaaagaaggtgaccatcttctttactttctgggggctgaatgctatcaaaagattggacaagcctgcggtgaagaaagatatctgggggaagatgttcggcatgatgctgccttccagttctttaaagctgagattgtctaaaatgaatatgggtggaatgggagccaggatgatgcgatatatcatgaataagaaaaacatcgactcactggaatctctgcgtactcaagccattcagaacggagtggaatttattgcttgccagatgtcaatggatgtaatgggtgtgaaacgtgaggaattgctggatcatgtgactattggcggagtggcaacctatatgaaccgtgccgaacaggcgaatgtaaacttgtttatttaaatttgcatggagaaaataaaatcaatatgtgtcatgagagagctgttcaaggctctctctgaacttgaaacccgcttgatggaacaatatggagtgtcattgaatgaggcaatggcactttgttgcattggcggagatacgctgacagccagtgtgatatcggaaaacacaggtctgtctgcttcgcatacttctaaagtcatccgttccattgaagagaaagaattaatcgtccgtaatttgggggataaggataaacggcagatgcattttactttatccgataaagggcgtgaatgtttggaagcgctgaaagcaaatgaaatagaaataccggaactattaaagccattgtttaaataaacccttctcttttccatttgtttattccggatatgaaactggagaaatggaaaaacaagtggaaggagtggagcaatctgcgcaaatggcaaatatggaaactgaagctgattgatgcccgtctgtatttcgtgagcatattcgtggggctgcttacgggactggttgctgtgccttatcactatcttctctggtatttctttgatgtgcggaaaacttttttcacggcgcattatccgtggtattggcatgtattgttgttttttatcttatgggggattctgatctttgtcgcttctttggtaaaacgtatgccattgatagccggaggcggtattcctcagacacgtgcggccaataacggtcgtatccgttatgagcatccttttaaggaactggtggccaaattctgcggaggtgtgttggctctcagtgcggggctgtccttgggacgcgaggggccgtctgttcagatagggtcttatataggaacacttatctcccgttggggacatatcctgaaaggggaacggaaacaattgctggctgccggagccggtgcgggcttgtctgccgcttttgccgctccgttgtcttcttctttgctggtaatagaatccatcgagcgttttgatgcgcctaaaaccgccattactaccttgttggccggcgtggtagccggaggagtggctagttggatgttccccacgactccttatcatctgattagtgcggtcgttcccggtttatcttttatccgtcaggcagagctttatattatctttgccgcccttatggctgtcattgcaaagttttattcgctcatcgttcctttctttcaagaaaggatacctgccatgaaactctccattcctgtcaagatgttgtatttattgatcatagcttatgccatatcgttaacagagacgaatctgacaggtggcggagagcagtttttgatgatgcagggaatgaatggaactcatgatatccggtggcttactatcatgatgcttattcattttgtttttacgctgttttctctttcttcgggtttgccgggaggaagtttcattcctaccttggttacgggaggattattgggacaaatcttcgggttggtattggtacagcgcggatggatagggtatgagaatgtgagttatatgatgctgatcgggatggtggcttttttggtggctgtggtgcgtacccctttgactgccattgttctgataacggagattaccggtcatttcgaggtgttctatccttccatcgtggtaggtgggttgacttattatttcaccgaattgttacagataaaaccttacaatgtattgctgtatgacaggatgttccgtagccataatccggagtcttccgaagaggctggtgcccgctatcatctttttgtcgagataatggatgggtcttattttgacggaaaggaagtggatacattggctttacctaatcattgtatcattcgtagtatacaccggaatcgtaaaaacttacttcctcaggggcaaaccctggttcccggtgatcaagtggagatagaaatggatgcgcaggatatagaaaaattatacgaaccgttggtcagtatggcaaatatctattaaatttgccgtatgaaaaagaaattccagcttgaagttccgggaggagccgacaaagtgttgcttcatacttgttgtgctccttgttcatcagccatcatagagtgcttgatgcagcatggtgtcactccggttatctattattgtaatcccaatatttatccgttggaggaatacattatccgcaaggacgaatgtacgcggtatgcccagtccttgggattggaaattatagatgccgattatgatcatgatgcctggcgttgtcgaatggcaggaatggagcaagagcctgaaagaggaggccgttgcttgcgttgtttcaagatgcgactgcaggaaaccgcacgttatgcccacgaacatggattcccggttatcactactacgcttgcttccagccgttggaaaagtttggaacagatagaggaagcgggccgatatgctacggctccttatccggatgtcacttattgggaacagaactggcgtaaaggtggattgagtgagcgtcgcattgctatcattaaggaatataatttttataatcagcaatattgtggctgtgagttcagtatgcggaaagaagaaaagggaggatgacgggaatgaagatgttcaaactgtggatggttgtgatgttattgggactcttgcccgttgtctcagaggcgcaagaagacataaataatgccattaatgtacagttggagtatctgaaaaagtatcctaaagataaagacgcgcttcggaaagttagttttctctatctgaataaagcagattatgatcaggctatcttttatggtcgacaattgtttgagatgggttataatgaacgggattacaatggcgctgtaatttattctcatatttgtctggggcaggcccatatgatgaagggaaatgtaaaggaggcttatagtcatttagggcaggccaggctgataggtgaaagtaataaaaatgattccgccttatgttccgtatataatgggctgggactttatgcatcgaatgtccaaaaagactattatcgttcacttacctatttcttcaaaggagttgaagctgcaagacgttgtcattatgacaggctctattccattttgctttctaatattgccggtatttattatttgaaaaatgatagcacaggattgaaatatgctcttgaatgttatgaactgggacatgaacggaaagatccttatctgatttatagtggttcaaccaataccgcttatatgtattatttgaagagtgactataatacagcattgaaatatattcaggaggcggagttcaccatggtgcagaatgacttttatgatcaatcaaacgtttacaatctttatggatatattctgcataaattgaataaagatgatgaagcgctggtttttttccggaaggctttggatttgaaagaacagggaaatatttcttcagtgatgaattcttatttgggctatgccgaaattttaatggagcatcaccagtatgaccgggctgtccggatgctgaaagccggaatagaactgtcttaccaacaggctaatgccatctatcgaagtgacctgttgaaggctttatcccgatgttatgaagaagatggtatgctggtagaggcgttgaagtatcataagctctatcagctggaaacagatagcttatataatgcggaaaaggaacgtgctgtgggggagatacgtgcaaaatacgatatggaacggcaggaaaacgagataaaacaaaaccgtctggaattattggaaaaggaaaataagatgcaattgcttatagccggatttatctgtatcttcatagctgcctctttactatattacttatattacagaaaaaataagctgtaccttaccattgtgaagcaaaatcaggacgctatccggcgtgaacagcaattgcagaacaaaatagacgagcagtttgcagagataggccgccagtccgctcttttacaagaatatcttacggactcgacgaaaacttctttgccgcaacctgagaaatatgcttcatcctcgttgacagatgaaaagaagcaggatttatttctgcgtttggaaacgctgttgcgggaggagaaggtatttacagacaatttgctgactaaagagaaagtagcggaaatgttgggaactaatcgtacttatctctctcaaattattaatgagcagaccaagcagacttttactcaatttgtaaatggtttccgcacaaaagaggcagtccgttcactttccgatcctgataaccaaactccgctaaaggcgatttcagctgaattgggctttaattccatgactactttttatagccagtttcaggcggctactggtatgactcccgcccagtatagaaacaaagtgcaggaattgcataaaaatagataatctattaatttgctatcataaatttatccaaatgcggcaattgctgtatttggacaacctgtttttgctataatttaaaactttatgcattaatttgctatcgacgcaatataagctgcaaaactgttttaacaataaaacgggacttaaaagtgattataaacagtattaatattaaatctataaaaagtatgaaacattcagattaccacggaaagctacttcgactggcgatgtttttcgttgcattgtttttgtgtggaacaatggcatatgcacaaacagaccggatgatcagcggtatagttgtagatgagaatggagatcccctgcctgccgctcacatccgtcaggtgagccagacgaaaggggaggaactggctgctgtcataaccgatatgaacgggcacttccggctgaccctgctccgcacagcgaaagagatagaaatctcttacttgggctatgaatcaaagaaagtaagattgacaagtgcgaacagttacagaattgtcttggagccggcctccgaactgctggacgaggtggtggtaaccggatatcagactatctctagggaacgggctaccggttcatttgcgaaagtagattcgaaaaagttggaaactcaacggttaagtagtgtcagctcattgatggagggaagaatagcaggttatagtgacggtaagatacgtggtgtgacttcgatgaacggacttactactcctctgtatgtgattgatgggtttccggtagagaaaactatttctgacggactgggcaactgggtcgaaaatgtacctgatttgaatatagaggatatagagaatattacggtattaaaagatgccgcggctacgtctatctatggtgctcgtgctgctaatggtgtagtagtcatcactactaaaaaagccggaaagaatcagctgaatgtatcattttcagcgacattgacagtacgcccttataatttttataccggtcacttggccgatacggctgacatgatagagatggaaaaggagtgggcggccatgaatcctaatcttcaaggagagggagcatcccaatatgcacagaatttgttggacaatgcatccatgtattcctgtttgggggtacaggctattttaaaacatcatacaggtgcgatcagcgaagcacaaatggagcagacgctacatgaactggcttcacagggattccgttattatgatgatgtgaagaaatatggtaaacgaaatccgttttcgcaacaatataacttgaatatcgggcgtggaacggaaaaaaatacatttaatgcttcgctgtcttacaggaataaccgggaagaagataaatatactgacagcgagactttcggattgaatttgcagaacactagccggcttacttcatggttgagtctggatttgggaacgtatctgaattatggagatggtacaacgcagagttataatctgacctcacccggatataattatgttccttatagttcgttgttgaatggcgatggaagctactatactaacacggctgcggaccggtacagtaagtcacaacaggaaattatttcttcttacggattgtatagtatggatattacccctttggacgaattgggaagaaacttgtcgaagagtaagaattttagtaatcgtacttttgcgagacttaattttaaattcacagactggttgagatacactgcttcgttccaatatgaagtaggggaatataagacaagccaattgcaagataaggaaagctatgctgtgcgtaataaagtaaatacatttgctactgatgcaagtgggagtggccaggctacttataatcttccttatggcaatatttatacaacggggactaatagtatccgtgcttataatttccgtcagcaattggattttaacaagacatttgcagaaaaacatgatgtgaccgctttgtttggtatggaagtacgtgaaaataagacggaatacaataatcggaaatattataattatgatccggctttactaacttatgatcttattgatgaacgggtgctgagtaatacttataccggagttttgggaaactatgtatcattcaataaaaatgatatctccaacatctatgaactggtaaatcgttttgtttctttttatgggaatgcagcttacacgtatgatggtaaatatatggtgacaggaagcattcgttgggatcgtaccaatttgtttgctactggttccaagtatcagaagaaacctatctggtcggtaggtgctggttggaatctggacaaagaatctttttttaaagtttcatttataaatatgatgaaactgcgtttcagttgtggtatcggtggtaacatcgccaagaattctgctccttatatgacggcttattataataataatacccatgtgggcggcatacaagggactatcagcaaccgtcctaatcctgatttgcggtgggaaaagacaactacagctaatattggtgtagatttctctatgtttagaaatcgattgaacggttctattgaatattataataagtcgggcgtggatttgttagccaataccaatggagtacctaccgaaggttttggtttttctacttataccatgaataatggtaaaatgagaaaccgtggattcgagttgactctttccggtgatgtcattatgggaaaagattggaattggaacgtaggtggtgtgctgggatacaataagaataaagtgacttatgtcaatgtaaaagcacctgctatttttcttcagttcgattatcctgccgcctatccccgtgttggagtgccttataatgccatttatggatatctgtgggcagggctggatagtaaagggcagcctcaggtgtatgactcggaaggaaatatccatgtaagcagttcaccgcaaaaagtggaggatgctgtgtgtttaggaacttctgttccggtttatagtggggctattaataccaatctccgttataagaattgggaactggctgctcaactgctttttgaaggggggcacaaaatgcggaataccaatatagcctatccgggattaggagtgacaagtaaggatgtgagtaaacgttggcgtcagcctggtgatgaggcatataccgatgtaccacgctatgttccgtcagaaagcaaggattataattcttactcatccgatctttatagcaaggcttccattcatgtacttgatgccgataactggcgcttgaagaatctctctgttacttatcatgttcctgcaagtgtatgtcagaagttttatgtaaaaaatgcacgtatcatgctaggtatggaaaatgtgttcactttggctaaaagtcgtgatgtgaaatggatgcttgggggatatagtaaaccaaattatttgtgtaatgtcaatttgaacttttaaatgagagcaatatgaaaaagatactatttatgataatgacagtgttagggtggataaatctgacttcttgtaatgattatttggatattgttcccaaagggaacaaaattcctactaccttggctgattttgaagcattgctgcgagatgaatataccattggctatattcctgtaacgaatagtctttatctgttgaatgataaatttgtaggacaaagcagtctgactagcgttacccttacgagtgccaattatctgtggaatgaaacagcggacagaattgtactgaacaatcaggacgaagggacttattaccgtagttatatggctatttccacttgtaatctcttgctggagcatgttcccgttgcaaccgaagcgactgattccgaacgcaatgaggtaatggcttatgccaaagtgattcgcgctatgagctattacatactggccaattattatgctgatacctatgtgtctgcaactgccggtactaaactgagtgtacctttgataaccagtgccgatatcaatgctcctcacaagcaggtcactattcaagaaatctatgatttcataattaaagatgtgaaagaagccatagaacaaggattaccccaacagtcaaggactgttatccatcccaatttgggagcagcctatgccttcttggcacgggtttatctgcaaatggcgaattatgaagaagcgctgaaatacgcggatatggctttggaacagaatgataatctgtatgattggatatcttattacaacagtcataaggaagctattacaaaagaagacagttatccgtcgttaccgtcagcgacagggtatgattatgtggagaattactatttccgttgtggagagggtaatcctaactatgctaccagcgaacttaatattccggtggaacgtgcggagagtttcgaggaaggggatgcacgttttttttcccgctggaaactacgcacggtaaatcaggatacttactatcaaggtttggccaaaggatatttcaacggggctggtctgaccacttgcgaggtatatctcatcaaggccgaatgtttggcacgtcaggtcacaggtaatgatttctctgctgctatggatgtgttgaacaaggtacgtaagacccgtattctgccggagatatatcaacccttgcaggcttcaactttgacagaagccattgacttgatccgacgtacgaaagacaatgaattgattttcactattgtgccattcgctgatgcccggaggtttaatgccgaaggtacttttgcacgtgcactatccaaaacatgggaagggcagacttatacattaaccccggcttcacatctttggattatgcctttcccggcaggtgccgttcagaatccgggtaatggaactatcactcaaaatgtatctaaataacctataaaaacagactttatgaaattgatgtatttattagcaacatccgccgttgttttggtgatgatggcatcttgtacccggcagtcggtaacggggtacacactgacagctgcaattgatggaattcctgacggatcccatgtacagttatttcctgtaagtcatggtcatgaaaaaccggtggcggacactactgttgtagatggaaaatttatatttaaaggggtggcggatgaacctctggctgtacggttgatggtgaaagatgcatacggttccatgcctctgatgttggagaatggcagtataagcgtggagggtaaggtgacttctgaaaaccttaatggaaccgtgaattataatttctcacaggtttcagtgacgggatctcctttgacggacaaatatgtaaaattattgagcacacgtgatgccttggattctatttatgtgacgaataatgagaagtttaaggatatccgtgctgcctatggaaaagcgagagttgccaaagataagatcttgatggattctgtcgttgctacggaagcttacaaagcatctgccgtggccgatagtttgttctttgctacggtagatgccacttactataaattagttatggacaataaagattcttattgggggcctctgatgatgatcagtttgttttcttatcttaccgaagagcagaaaccgtggtatgatgccttgtcagaagaggctaaacattcccgctatggaaaaatggtgaaagagagtgtggctcctgatagtcagatcggttctaaagtgcctgtctttacagccaagtctcaagatgggaaatcggtaactttaaccgatttgtgccaaggtaagaagtatgtccttattgatttttgggcatcatggtgtaatccttgccgtaaggagattcctaatttgaaaaaactctatacgcaatatgcagacaggggtttccagattgtaagtatctctattgataaaaaagaggcggaatggacaaaagcgctgaaagaagaacaacttcagtggcctaattttttggatactgaaggtattgctgatatatataaagtgaaatttgttcctactatgtatttgatagatgcccaaggggtcatggtaggagaaaatcttcgtggtgaggctttggcaaataaactggctgagctttttggagagattgaataatcatattctttttatggtattctgacatagaacggggcagagtcgatgaataagttggatctgtcccgttgtcttatgtttcggactgacccttcttctgagatattcagttaatgtttctaaagataaatggtctatggaaatgataatccctaatcactctatatgctatttttattatgatttttctgtgtttgttttcataattttattcggttctatccgtaaaatcatgtcataccgctttattttgtttgcttttaatcttatcgatcatcagtacagcatttgccgtatgtatcttgaagaaaattcacaggtcttccgttttcttgtttcgtaccttttatccttgagagtgagtaatgctgtttttgagtgtcgaagctgtatttaagttcggtagccctttcccttgtgaacaaaggaggtagatatcctatactacatgtagaaatttctgttcgcattgttggtgtatatggaattggctgcaacacattttaccctcacattcatcagcttctacttgaaatatcattataaataacattaattatcttgtggtttgttacatggcaggacgggtctgccatgatattgtagaacagttgatagtatctgtttccgttaagatgtttaatcggtaacctgtcggagaatctgatgtaagtttcaataccataagggctatctttgttgaagtactaaaactgttcttgcgctccagatggtgctgtgacagaccgacctctttggctatactgtcgaatggaaacacagaatgaagattgccaggttcactcctattaaactcttacgatattttttagaatatcgaattctgtaaaactcaaagtcaagtggatttctgaaatatttggtatcttaaccatgtctttgtttggatatttcctccgttttttttaggtcgccaaatcttatttgcgcacggaatacctaaaaatacaaaaaaaaaccaactaattctcaatagtttggttatgaattagttggctggattttatgttatttgctgaatatccttaccttatatattcaaaaataatacctatatcacagttatgttataaaaaaattactcatatcctggtgtttgttttaatgcgctgttgtttgttaatgtaccagcatcaataggccacaataatctggattgttcagctgatgagtattgatgtacataatcccaacctagcaagcggatatcataccagcgctttccttcaaacatgaattcgcggagacgttctttcaatatagcttctaacgcaccggcattatcaggtttcatccatttgttgtcagtgtagaactcaggatcgttatcgttaggataagctatttctgctttgtgttcattgaagtatttacttccataagcacgttcacgaacagcattgatttcttctgtaggatcttctcctagtaacacttttgccatagctagttgcaataggcagtcagcatagcgataaataggaaaatcgtctaagaaactgcgtgtagaccctccttccagcatcgttccttggaacttataagtgatagggccgaaataactgactactccttgggcatcttttttataaacggctttcaaagaagttgtccagcgcgtatcattgttacggaaacctttgaaataaaattctcgtcttacttgtagctgggtaagaccattaagttgtgcatctggggttccgacaaaggaattaccattctcgtcacaataaattttcaccattttatcctgtgcaggaattaatctcattctatagtatcctccccacatttcatattcgtctttaccattgtggatagtgaaaatcatttccttgttctttttattctcaaaggagaaaatatctttaaaagaactggttactaaaccaacatctgctttttttacgttttcaaaggcgttttttgcaatggtataatcactgttgcctccattcatctggcgtccgctccacagataagcttctccttttaacatttgagttgctgcggcagaccaaaagtgacgtcccaatttgaaagaatagtcagagccaaaggcattttctgatgcctgaatgtctttctttatttgttccataacttctgttgcaggtgatactcctttggtaatgttacttaaatcaaggttctgcccttccgtgtaatctaagtataaaacgacatctccccaggaacgtagcaagtggaaataaaggtaggcacgcattccgtaggcttcacctaaataataattttgggtggcttctgtcagaattgtcgtttctgtggtcttggcaatcatctggtttatttgattgatgattttatacatgtcaccataattgctgatacctacattttctttatttatggtattgaaaggtaaacgttccatgccttggcttgcttcgccaccaataggattgtctccgtaaatgtctgcacgaggttcacccagtaagaagaaattataacttttttcgcgaagtaaagcatgcagtcctgtattgaacgcagtgaattggtccgggtttttccaatatgcggttcctgccagtgaactggtaggctcaatatccaaggaatcacatcttgaaaatgatagcagagaaagtcctgccaacaggtatgtaaatatctttttcatgattttattcttttatagttgtgttcaatttaaaatgttacagataaaccaaataatacggttctaggagtaggatatcgaccttgatcaacgccgtatagattttcattattatcactatttgtcaagacaggctctggagaagtgccggtatatccggtgacatagaacagattttgtccggtgacatagacagatgcgttttgtataaatgctttgctagtccatgctttgggcaagtcccaacttagtgttaattctcgtaaggctagatagtcagctttttcatagaggcgtgaactgttgttatgacggctggctgaggcattattggaacgggtgatattctttttggccaattggtctgcataatagaatgccggtaagtctgaattcggattatcttcactccacatatcttttacttcagtaattatattgaatgcaccttggtattggcctaaagtacgtgcggccaagtcattataaagagtatgtcctaatgcatagtcaaaacgtgcatagagggatatacctttccaagaaagagttgaagagaaaccgccggttacttttgggaaaatattgcctactacttcgcggtcaagtccattgattttattatcaccgttgatgtcttcccagcatacatctccaggttctataggtttccatccttcttttcctgcatattcactagctagtcccggaccgtacaggttagcaacttcatcaatcatcatattagcgtgctctttaacatcatcccagcttttgaaaatatgattttgcttgtaagctaccatttcgcccaattttccgccttcctgacgtccggcaatccacttggtggcatttgttcctttacctacggcaacttcataacctcctactcggttgttttctataccgttatagggtaatgagataattttgtttgctaccgaagataaattagcggaaaggtcccaggtaaaaccacctacattatttaatatattggcttttacctccaattctatacctgagttacgtaaagttcccatgttggtcataatatcggaaaaacccaaataacccggtagagcttgtttagtcagcaagtcatttgttcttctgttgaagtaatcgataataaaacttaatttgttattgaaaaaaccgatatccaaccctacttccaaggtcttgctctgttcccagcgtaaaccggtatttaccaatgccgaattatagaatgcggaagatcccccatagtttttagcatctacaagaccataggcaccatatacatcgaagttgccaattccatttacattaccgtttacaccataactgatacggggtttcaagtttgaaatcacttctgaaatttttgaatctttccagaaattttcttccatcacattccaacctaccgaaatgccagggaagaatccccaacgattgtctttcagacgagaaataccatcatagcgggctacgaatgaaaataaatatttcatgtcatagttgtaattgatacgtccgaaaccggaaagaatgcggtaggcagttcttgtggtggaagtataagtctgcttggcaccaacatttaaagtaggtatgtcatcaattggtgaattttgagtcttggcttcaaactggaattcatcataattataatattcaccacccaacatgacatctacattatgcttttctgcaaatctatccgtatatgttagtgtactattgaattgcatttggttatatctcttgatccaagcttcagcttgacgagtatttgtagctgtagaagaggactgtaatttataacttttattgaacttttccctctggtagtcataatgtaaaagtgaagcgtttccgcttaatacgagttttttagggagaatgtcaagatcaaatccaatgttataggattgtcggcgctctccgttatgttgtgtcagtttgtccctgaaataggcaggattaccgtcggaagtaccacctcctgatgctggattaccctcttcatcataggggttccatgtggggcgttgagaacgggttcggtaaaacatttggtcttcactaatccatagagaaggtttgctggcccaggtataagttgctccggcttttacgtttaagaatgggaaaactttataagaaccatttacagaaccgttaaatctcttatatccggtacctataatctgaccgtcttcattgtaatatcccaagcttgtagcaaaagttcctttatcattacctccggtgatacttatataatgttcttgcataaaagcattgtcatcgaatacgtcattatctaatagtcctccataatctttaaatattatttttttacctggatttacggggtcgtccatcgtttgccagccttcattttgcaaatgagctgtttcatcattcaagtagcgaatatcatacatattattgccgatgccatatccttgctgagcatccagaccatcatagccttttacttttttatatccgatacggttgtaataaatatagtcttcagcgtttaggtaatcatatcctttacgggcaaaattcacacccattttgaatttgtaattaactgaagcttttccggcttttccacttttagtttcaattaaaataacaccaccgtttgctcgggcaccatagatggcagtagaagcggcatctttcagcacttgaatggattcaatgtctgaagagttaatatcgcccatactatcacgtacaacaccgtctacaataattaaagctttattgttggctccggtgatagtagctccaccgcgaagagttatactaggttcagagccaggttgaccactgacggtaacgacacgtaaacctgtgacagaaccctgtagggcttgtgcagcgttactataggctgctttttcaagtaccgaattgtccatttttgaaatagcggttgttaaagtcgcacgtttttgcgagccaccgtaaccagttaccactacttcatccaaaacttctgtatcttcttttaagacaatttggtaggagttttgaacaccggttgtaatggtctgtgttttataaccgatgtaactgacattaattttagctccttgggatacgtttagagaaaactttccatcaaggtctgtaatggtaccatttgtagttcctgcttctaccacactggcgcctatcaccggttcattggtagcatccactactgtacctgtaattgttttcgtctgtgccattacattgaatgacattaaaagacctaataacaaaaaaaggttctttttcatagagttaaaaattagtgattaataaagattttgaatttgaagtatgaattattcaacatattctaatttaagtgtccatgcatactgacaaggaactttgctgtaaggaatagtgggaatttctattactatattatttccattctgtttccatttcaatgttttgtcatatcctaataaagttatttttgttttggaacttgttctaatgtctttcagtatgacttgattttccggaaatttaggcagaatggcatatactgcattatttttagctgtgaaaaaggcttcttttacggcaaagccgggatcgggatctactgtttgttttaaaatagagtttcctcctacataatgttttcctttatctttccaatttctgtcaccttcagaccattgttcagattgtttccatttgtaagtatcatagattgcttctccatttacttttagccattctcccatttgcaataagcgttcctgcatgatagggggaattttgccatttccattcggacctatgcccaagagtaagttcccacctttgcttacaatattaactaaggtaagtattaatccttgtgggctggaataatcttctatatcttcattttgattataagagaaagagaatcccatgccacgacattcttcccaaggtttatcctctggcatattgcgattgctatattcacgggtgtaataatcgccatgctttttcccatcagtaaattttgcccatctgtcattcagtacaattttgttctttactggggattcagaatagagccattggaaaagtttttttgtttgccaaatagagtcactgtaattatcgggaccgtctgaccaaagaatatcgggttcataccgatttaccagatctttaacttgcggtataaaatgacgggatacatatatattaagtaactccgggcaatataacggacttccccattctctgcatgaaatgtagaatcccaccttaatgtctgtttttctaagagctgtggtatattcacctaccaaatcgcgtttaggacctatttccatactgttccaaggtctgccgtaatctctagacgcttccatacttggccataatgcataaccgtcatggtgtttagttgttaaaactacatacttggcacctgatttttcgaatagtttggcccaagcgtttgcatcgtaatcatgtgctttaaatttggcagcaaaatctgcataattaaagtcttctccatacatttttgtatgataatcataaatttcggttccggtaaattcaccgttccccattaactttttattatccagccaatatttataccattcttcgtaagtgcctttaggtgaccacatgggtacagaatagattccccaatggataaagattccaaattttgcatttttgaaccatgcaggggtagggcgagtatcgagcgattcccatgttggttggtagatattgttttgagcattaattttgataaagattaatagcacaataaataatagtgatttctttttcatattagtattagaattttaaatattatattaaccgcaaatatactatttttttaaaagcatcaaacatttttaataaaataatttattaaaaacagttatttctttaaaagaatattgttttattctgtgatatatcagattatttattttaatacgtgctcttgtttgtttattttgtatatatagcttgttattatttagtatattggaaaatatggatataatattaaaataaaagagtaggaagatttaaatcaaagtaagcgagtatgtctgcaggcaggagtatagacaaatatctatcggagtaagtgattctcccaaattttccgggtcagttgagtcactgccgttttcaaactgagccttgatcccggctatactggataccctgcacaaagcagggtaaaaataaaaaagccatcgatttatcgatggcttttttatttggtagcccgtgggggaatcgaacccccctttcaagaatgaaaatcttgcgtcctaaccgatagacgaacgggccatcctttttatcgaggatttctctctcgattgcgggtgcaaaggtagtgactttttttgaatttgcaaacatttcccaaacttttttctaaactttttgttcatagtccattgaattgactatttacctaaacttaacttttatgaaaagtatctttaaatcaatgagttgccttgtattgggcgcaatgattgttacgccgatgtttgcgcaacaaaaaaaactttatccggagctggaaggaccgggacctgttgttattatctcaaaagataaaaatggcaaggaagaattaatcaatgtatttgaagaaacgcaacgtccgcatttccatgatccccgtgctcctcgttttttacttactgaccaacagggaaagtttgcattgggtatcggtggttatttgaaaactacaatggaatatgattttaatggaatagtggatgatgttgactttatccctgcactcattccgcaaccgggatccacgtctgtccgtaatcagttccagatggatgcaagcacttccactatctttttaaagttggtggggagaaccaagcatttgggtaacttcatcgtttatacagccggaaacttccgtggaagtggaaagacttttgaattgcagaatgcttatttatctttcttgggttttactatggggtatgataccggattgtttatggatcttgctgcagctcctccgactattgattttcaaggacctgacgggatgactttctatcgcgctacccagttgcgttatgaagccaatgtgatgaaaggcttgaaagtaggcattggtgtggaaatgccgtcagtagacggtactccggcacaagatgtgagaatcggtaagcagcggatgccggatattcctgcctatgtacagtattcttgggcaaaggctagtcatatacgtgtgggaggaatcttgagaagtatgacttatgaggatcaagtgaataataaggcaaagtcattgaccggttgggggatacaagcatcgggaacagcaagactgggtagtttccagctttacggacaatatacttatggtagaggtattgctcaatatttgaatgatatcagcaacttgaatgtagatatcgttcctttggccgatgagtccggacgtatgcaggtactgcccatgaaaggatggtatgccggattacagtataatttctcgaaacgggtattcgcatcggctacgtatagccagtcacgtctgtttacagaagattgctatgctcactttaatgaaactcagtataaaaaaggtcagtacctggttgcaaatgtattctggaatgtaagtcataacttgcaggtaggtgcggaatatcttcatggttggagagagaattttaatgatgtgaaccgtgaagcaaaccgtataaacttgagtgcgcaatataatttctaacttatttttcctatctttgtgtctatcaataatggaaagagaatgaaaaaaataggtgcacatgtatccgtaagcgggggcgtggaaatggcccccgttaatgcattagggataggagcggacgcattcgctctttttacaaagaatcagaggcaatgggttgcaaaacctttgtctgtcgagagtgttactctgtttaaagaaaactgcgagaaagaaggttttgatgcccggtatgttcttcctcatgacagttatctgataaatttgggacatcctgacgaggaagggctggagaagagtcgtgcagcatttttggacgaaatgcagcgttgcgagcttttaggattgaaaatgctgaattttcatcccggaagtcatttgaataagatatccatagagaagtgtctggacaggattgccgagtctgtcaatatgactttggataaaacgaccggtgtgactgctgtgattgagaatacagccggacagggaagtaatgtgggaaatgaattctggcatttgagatatattatagataaggtggaggataaatctcgtgtgggagtttgcctggatacttgccatacctataccgccggttatgatattgtgaatgaatatgaccgggtctttaccgagtttgatgaggtagtggggagaaactatttgtgtgccattcacttgaatgactcaaagaaaccattgggtagccgggtagaccgtcatgacagtatcggaaaggggctgattggtattgatttcttccgccgctttatgcaggattcccgttttgacgatatgcccgttattcttgaaactcccgatgacaccatttggcgggacgagattaaaatgcttcgcagctttgaattatagcctgtgctttgagtgagttgcttttaacagtaaacctgtaggtgggaatgatgtgtgttttcatgcgtatggttaagccttttctatcctatccctaagcttaaacgaacgtatcctttctatctccatagcctttggagttaactcccaagcttatggagataactccaaaggctatggagttaactccgcaagtttgggagatagaagttgtcagtaaaagaacccttaacctgaaggatacaaccgcttagcttgccgtagtttataggataatatatcctttccgtatccttcgtttattttatgtcctgattacatgtcttttatttcatccaagttcttctggatatcttcgtcttttaactcataattcatcaagttacctgccaggtattggtcgtatgaggccatatcaatcagcccgtgacctgaaaggttgaacaggatcactttctcttcaccggattccttgcacttgttcgcctcgcgtacagcggcggcgatggcatggcacgattcgggagccggaatgattccttctgcttgtgcgaacaaacaaccagcctggaaggattctaattgctggatatcaaccgcttccatcagattgtctttcaataattgtgaaacgatgacacctgcaccgtgataacggagacctcccgcatggatattggccggagagaaattatgccccagtgtaaacatgggcagcaacggggtatatccggcttcgtcgccaaagtcatactggaatttaccacgggtcagtttcgggcacgaagccggttcggcagcaatgtatcgggtttgtttcccattcaggatagtgtggcgcataaaggggaagcagattcctccaaaattggaaccgccaccaaagcaaccgataatcatgtcgggatattcgcctgccatttccatttgcttttcggcttccagaccgataaccgtttgatgcagtgtgacatggcttaataccgaccctagtgtatatttacagttgggagtgctcattgccagttcgatagcttcggagatggctgttcccagtgaaccttgataattgggattacgggtaatgatatccttgccggcacgggtagacatggatggagaggcggtgaccgttgctccgaatgtctgcatgatgctgcggcgatagggcttctgattatagctgatctttacttgataaacggcagcttccagcccgaatacctttgcggcatacgatagagcggcgccccattgtccggcaccggtttctgtagtgacattggttacgccttcttccttgcaataatatgcctgggccagagccgagttcagtttgtgggagccgatggggctgacactttcatttttgaaataaatatgtgcgggagtccctagtgctttttccagtccgtaggcacgtaccaatggtgtgctgcgatagtatttgtacatttcacgcactgcttcgggaatttcaatccatgcgtctgtctggtttaattcctgtttgcaaagttctttggcaaaaatggggtagaggtcttccggtttcagcgcttctttggttttagggttcaacggcggcatgggtttggtcttcatgtctgcctgtatgttgtaccagtatttaggaatttcatcctctggtaagataaaacgtttctgttttgtgctcataatctttcaatttaatagttttgcggtcaaaattaggtaaaaaaagtattccttactaattttcaactgcttttttgtcgggaacaataaaaaaagggatgtcagagtaaaaatgcgaagttatttgttattataggcagagatgtgaatattttgattaagtttgttttctgttaatgcaagatgatatcgacatggaacctttacacaaactatttatctatcgtaagaagttagtaaaaccgtacatagagcgattgctgaaatggatggacgggataacttatatgatgtcggccttgttcatccttacattggtttatgagcatggatttcttatttcttttgaagaaatggagatgataaacacgctgtatcattttgtctggattgtttttctggttgatatttccctgcatcttttattaaattactcggataccaagcggaagtaccggggactggcatggatactgagtctgatgctttatctgactttgattccggttattttccatgaaccggaggtgcaagggggaattcatgatttctggtcttttttccacagtcgtttatatcatgtggtgctgctcactttgctttcgctgctgcaattgtctaatgggatagtccggctgctgggcaggcgcaccaacccgtctttgatctttgcatccagttttctcatatttattctgataggggcagcgttactgatgcttccgcgtgccacttatcatggcatttcctttatcgatgctctgtttaccgctaccagtgccatttgtgtcacggggttggtttcggtcgatgtttcttctacattcacgtccgaggggttgttcatcattatcatgctgatacaaatcggcggtttgggagtcatgaccctgaccagtttctttgccatgttttttatggggaatacttcgctctacaatcagttggtggtccgtgatatggtaagctcgcagtcactcagttcgctgctttccaccttattatatatattagggtttaccttggtgatagaggctgctgggatgggggttatttttttaagtatacatggcactatgggcatggatattgaggaggaactggctttttctgctttccattccatctctgccttttgcaatgccggattctctactttgtatggaaacttaggtaacgaactggtacttcataatcataacttgctatatatcactatctctttcctggttattttgggaggtataggtttcccgattctggtaaatctgtatgaaacggtttcttatgaaagcaagcgcttgtatcaccgttatgtcaaaaagaataagaggacaatccgtaaaatacatttatataacctgaatacccgtatcgtattgattatgacggctatcttgctagtgacgggtactgtggccattgttgttttcgaatggaatcatgcttttgcgggaatgacggctacagagaaatgggtgcagggcttttttaacgcaacttgtccccgtacggcaggattttcaagtgtgggcatgactactttcagtgtgcagacgttgctgctgatggtggtgctgatgatgattggcggcggtacgcagtctacggccggtggtgtgaaggtgaatgtgtttgctgtagtcatgttgaacttgcgtgctattcttataggtgccgataaagtcaatattttcaacagggagttatctcatgattccatccggcgttctaatgccacattgattctttatctgctgattgttttcgcgggtatcttcggtttaagcattctagagccgcaggcttcagtgatggcgttggtttttgagtgtacttcggcactcagtacggtaggttcaagcctggatctgacacctactttgggaagtgacagcaaactgattgtcattgttctgatgtttatcggacgagtaggggtgcttactttgatatccagccttattaaacagaaaaaaataacaaaatataaatatccgagtgataacatcataatcaactagttatgaaatacattattattggtttaggaaattacggcggagtgttggccgaagagctttccgtattgggacatgaggtgataggagtggatacaaacgagcatcgtgtggatgtgttgaaggacaaaatcgcgacttcttttattattgatgctacggacgaacaatcgctcagtgtgctgccactgaaagatgtggatgtggttattgttgctatcggcgagaattttggtgcttctgtgcgtgtggtggcactgctgaaaaagaaaggagtgaaacatatctatgcccgtgcggtagatgatgtgcataagaccgtgcttgaggcttttaatttagatagtattctgacaccggagaaagaagcggcacggagcttggttcagttgttggatttacacgtcaatgtggagtcttttcagattgacgaggaacattatgtgatgaagttcaaacttccttcttgttttgtaggctataaggtgagtgatctgtcattagaaacggaattcaatataaaaatcattgcattgataaaaggggagaaagtgctgaacggtttgggtatttcgatattggagcatcaggtggagaatcattttgaggaaaattatgagttggaggaggaagatcagttggtctgctatgggctttataagaattttatggatttttggaaggcgttgtagcaggaatgcctttcaaagaaagaatatttttttctaattgagattaaaccttttcttttgggtttagtctaacttaataaataatttagtttagtttttagttttctctgaaggccggccaatgtgatattgcccggttttcgctttttatggaggttttcttgtgagtgtccgttactttttgttactttgtcacctagaaatcgagatttagatgaaacagatatattttttatttgtcgttttgctggttgtaatgaccgcttgcggaggtaagaaagaggcttccgttgatgcagaacaattgatgttccaaatagacagtgtggatcatgtgacaggtttgcagcgtatgcaggtttcacgtattgaccagcatattgtcagtggcggaaaaaaatataatttgtttatagagcgtgctcccagtgattctctgccttcagtcaaaagtgacttgggaatttttgccgacaatcgtatcatcgttagaatttcccgtgaaaatgggagccgggtctttgccaaaacttttaccaagcaaagtttctctggattcgtaagtgctgatcatctccgtcattttatattggagggcgtggtatttgatgaagagaagacccgtgagggaaaaaatatcatattggctgccagtgtgagttatcctcagacagatttgtatattcctttctccatcactattactcctgaaggaaaaatgagcatatctaaaaatgaggatatggaggagcttcctcccatgttgggagacagccttaattaaatctaaaatacaggaataatttttcgcgtcataatctttttaggcggttagttgttggtatggcattaactaactaaagaataaattagattatgagaaagattttatttttaatggctatgctggtatgctctcttcagttcgccatggcaggcgatgttgtgacccgcgatgtgaataagcttcctgttgccgcacgtgaaatgatcggcaaacatttctcccagactaaagttgcgtatatcaagattgaaaaggacttgtttcagaccacttcctatgatgtaaaattggccgatggcattgaattggagttcaattcaaagggagagtggcttgagatagattgcaagaacaagtcggttccttctacttttatccctcaggctatttccaagtatatgaaagctaattataacgggcataaaacggtgaagatagaacgtaaccgcaagggatatgaactgacattggaaaatggattggaagtagacttcgatcagtttggaggattcttgaagttgagcgattaaaaagattttttctgtaataggggaactatctctccttatagtaatgatgccataagagggtgtatcagaaataaattgaactatctttttattatcagcgttgaaaaagatagtcgcaacgaattttgattcaccctcttatgtattataaatacagttctcggtctttgccctgttattaatccatcggctcgtaatcttttgccagaccgccttcgctggtttccttatataaggaaggaaggtcatgaccggtctgtttcattacttccaccactttgtcaaaggatacacggtgattaccgtctgtaaaggcagaatagatattggcatcaagagctcgggccgctgcataggcatttctttcgatacaagggatttgtaccaatccgcataccggatcgcaagtcattcccaagtgatgctccaagcccatttcggctgcatactctatctgggccgggctacctccgaataattggctggcagcggcggatgccattgaacaggccactcctacttctgcctggcaaccggcttcggctccggaaatggaggcgttgtgttttactatatttcctatcaatccggcagtagccagtgctcttaaaatccgcatatcgctgaagtcacggcttttttgcaagtgataaagtacagccggaaccactccgcatgatccgcaagtaggggctgtgacgattttgccacctgaggcgttttcttcactgactgctagagcgtatgagaatactaacccgcgggaacgcagattgtccttataaccttttgccttaatatagtaagtggaggcttttctgcgcagattgagtggcccgggtaatacgccttcttgatccaaaccacgctcaatggcttctctcatggttttccatacttctgccagataatcccaaatgtcttcgtcttcacattgctggacgtattcccagtaattgcgtccggtacgttcacaccagtagaggatttcactcatacggttcatatcatagatttccggagttgagcctttgtcgtgcccttcttcggctagagcacctccgcctacactgaaaacagtccattcatctgtcacctttcctttttcattcaaagatttgaaagtcattccattgggatgaaacggatagaagacatgggctttccagataatttctgtaggcgcatgcggttgcaatgtatctaaaatggctacatcggtcatgtgtcctttaccggtagcggcgaggcttccataaagagtaacttgaaaagctttggcttcgggatgttttcctaagaagatttcagcagccttgcgcggtcccatagtatgactgctggacggaccggtgccgatgcggtatagttctcggatagatttcatttcgttttataaggttagttattatgaggaacaaaggtataaaataaaagggggaaagtagcaaaaaaggaaaagaaaaactctcttgacaaataggaaagttgtcaggagagtttggaaaaccaccggtaggatttggtgtattgtctttattctaattgtctttgtatacctttgtcaccgacgacaaaatactgattattttcaatcagcatggcacgtccgcgctttttttcccggttttctttattgtccacatttactccgataaccttgccgttatagaaagtggaaatatctttgaaaatggtatgtcccacaataatatgttttgccttataacggtccataatcatttctagggagtcttttgccagcggattgtatttgccatcggtgcgtactagtccgcgataccagatgggaccgctgtttccatacaggaaggctgtgagtggagaaagcgctttgcgttcttttttcgtcataaatagtcctttactcatttcttcattgacagtgggaatgctcaagttcttgtcatagaagtctttgcccagtccggcatgtacatataggtcgttacctatcatttgcatggtgttacgggttcccaaccatctgcccagttcggtatcgggaccgaatagccgggggtactccatctttagtttttctgctaatattttatatttttctttggtgtatcggaggtcattggccagcaccatcggttcatgatttcccagtatgaacgatacgtgtcctccggctttggctgcttcctcttccagtttgtaaaatagccagaagatttgcggtacatcttttcctctgtcaaaaatatcaccgataatcatcagatggtttttcccgaagctccatttgtagtctttatcaatgatatgattgccttgtaacaggctgattacacagtccagccttccatgagggtcggacatgacaaaaactttgtctgcctggggataattccatccgggacgttttaccgggtgtagttttacatcaaatggaaacctgcctttgtggtctgtcacatgcagggtaaagttttgaggtaatgtggtataagtggtatcaatgatattctctttcttatctacattgattactctgatttggccgtcaggctgatacaatacgtatggaccgtcggctgttaattcttcttttttctctttgtctttctttttgtctttgaaatcaagagttccggcactaaggccggaactgatgaatgcgagggtaaatgcaagaagaaagtagttgataaaattagtcttgcttgtcatcgatttgatttaatattaaaattataaatttataggacatctattaataatgttcagtaatggggccttctctatcatctatttcttctatattgcttgttccttctataatatctccagttgcaaaatattttgagaagctgaattttatatctggattatttttatttattagttctacataaagatggataagtaaatcatccttttttattgggtaatgtgcatgaaaatgtttatcactggaatccccttctagaatatcagtgctaaagctggaacctcccccataatacttcatttcatttatatagccaaaaggaggggcagatgcataactgtttgatttgaaaagtaaattagctttggaatacaccctatattcttgagaaacaacaggattaacaagaatttcgtaatctcctacttcatattcataagtaaaatatccggcatcataatacattccgatttctccttcgacatttctgattatttgaggagatttttttagattccacacaccaaggggaaagttataaatgggtacatcattattgttgtttgtggttcctgctactggaaatgacgaaatacttccccaaccagttgttgtttgttcactttcaaattgcatttgtgtatttgtattgatttttagatcaatttgtccaattgaaggcttacttttgttgatgccaataatggaacctgctagaccttttaaggcacttacagctgcagagcctcctgacgtaactaatgcttttaacccgtttttaatgccactaacagttgcacctttaatactgtttccaatacttttccaaaaagaatctttcttagttattccgttttcaatttctttactgactgtattaataaacccttcttgattaactgcaatagaagtttttgaattattgaatgtattggcaagattgaaattgaagttagaaatattagtggtgttcattacgatagtacctgtgatatctccacttgtttgagccatacctgtagtttttattttattaacagcccaacctctaatttcgaaattagctaagctttgtgtattaagactaggatcataagcacactctatttctaatccataccaattgtttgctttatatccagagctaacaaactcgtttcctaaaaatgtaccttctgtacttgctatatatgaagatttttctgaacgatttatgggtatagaaatttcttccataaagttgaatagactggtagttttgtctgtacggattccccaaaaggcctctgaactacctaagcctgctgatgaagctatttcataaaagaaaaaacggagtaatcctgtatatttgtggtataaagcaaaatattttgtaggagtactttcggttatattgctataaatgagttcccagccattttctctagaataatatcgatttgcatatattggatcagaagcattctcgtctaaccatgttgaaggaattcctagattattgctgctaccttttttccatggaattcccatggtagttatggtatgtgtaaatgggtttatagtttcaatgtcatttatacggtcccaatcaaagtaattatcaaaagcagaacgattacttggtggattattggggtgggtggttattatgtcattggtaaaggtgtcatcacaactattaaataaacatgaagcaaagatgaataataataaggattttctcatatctttatgtattttatatagttaatttctctttaagttagggagtgataatactccctaacttaaagagaaggatttattgatttggattttatcaatttgtgttgactattatttcagatattctggtgtttgtacaatattagaattagcattaatttctttttgaggaataggtaatattgtacgataatagtttctgtcgaaatccatagatgttttttcgtcagcgaaatgcactacctctttcatcatatcgtctgtttcgttaatacgaattactcgtaagttattacgtaataagtcaaacatgcggtgcccttcaccaatgagttctttcctgcgttcttctagaacatcatcaagggtaacctttgcgggcatcgtatagtccggatttcctcggagtgcaatggctttcaggtattttgcagcttttgttgcatctccgtttttcacggctgcttcggctgcatttaagtaagtttcggaaagacgtactataggaatattggcatccataatattttctccaggttgtggttgatacttattcaaatacattacttttttgtcttgattaactaataacttaatgcgtacatcattaggcgtttctaacagatggtgataaaaactgactgtaatgcacatatcttgatatccttttggagaagttagatatcccatactttcattgccggggctttcggtagtagtattgactatttcgaagagaatttctcccggatttgcttcggaggcttccgtaccccatacagtgggatattcttcggtattccataattggtatttattggcttccgatccttttattgcttcttctgcagcttgtaaagcttcactgttcttccccatatacagatatgcccgacttaacaaagttaatgtggcccatttactgattttacctttcttatttaaggataaatctttttgattcaaactagtacctgaccatgaatatgtgggtatcattaaactagccgcattctttaagtctttgattatttgatcataacattcagctacagtgttacgtgaaggtttactgtcggcagtggctgatgctgaagtgatgataggtactcctaaagaggctccgttatcttttaaataagtatatccgaagaagcgcgtaaggtcaaaaagggccagaccacgtattgctaatgcttgtccttccaaatcattgcggaagatatgctcatcttcatcgtttggaagaatttcgatattgtcaatgccgtctaaaattacattacagttttgaatgatggaataaagatatgaccagtgtgtacttggtccatttgcaggtaaccaatccatttggtaatagtgagctgttctacaagttgattgtacagcttgcatgtcatctcctgttacatctccgtagtagattaaacgcccggaatacgcataggcattacgcattgtcgcataaatggcgtttagtgaataatcaatgtcggagagagatttgatactcgtttctgttggaatttgtgtggacggttctaaatccaaccaatcgtttccacatgaagtaaacaatccgatggataagactattgataaaaaattatgtaatgttctcatattgttgttttttagtggttaaaaattgatgttgagaccaaaagtaacggtttttaaaggcggtgtggtttgagttgcactaccggcactaacagcttcaggatcataattgtcataggccgcccatgtccataaattgcttgctgatgcataaaaacgaacatttcctatattgattttatttgtccattctttaggtaacgtaatgccgaatgtgatattttttaagcggaaataatcagtactgtggatacggcggctacttgttattttatgcattgatacagaagatgatttacccggcatatatacttctatattggtttgatcacctggctttttccagctatcacgataataagtcggaatgtttgcataggaatcgtaaccgccatgttctgtcttttgtgcccaagtatcataagaatatcctccgaattgataggagaataagaaatttaaatcaagccatttataacgcaatgaattagagatacctccgttaacagttggttctgcatgtttataaggaatgaattgtgcatttttagagttctcggtaatttcttttatataatttccgttctcatccaattcattggtatagaatagaggatttcctgtttcaggattgatgcccgcaaattcttgtacatagaatgtacgataagaacttcctactttgtgtatttgggttccactgacaatttgtgtctgttcgccatctaattttacaactttattggagttatgacctaaattgaaagttgtattccagttaaagtcttttattttaatattagtggaattaatagttaattcaatacctttatttttcacttcacctatattcattaaataactactaaatcctgttgtcatggatacaggacagtccattaataagtttttagttgtacgggtataatattcaatcgtgaagttcagacgatcccaaaaaccaaaatccaagccaatattcatattataattggtttcccatttcagattaggatttgcaatttgggacatttgaataccgggttgctccaagtaaccaccactaatggagcttaatcccatatagccgaaataatcagaaggaagagtaccgtttacaccgtatgatgctcttatacgcaagtctgtcaaccaatcttttacaggttgcataaattcttcttcaatagtacgccatgctccggatacagaccaaaatgttccccaacgattgtcacggtgcaaacgtgaactgccatcaacacgaaaactagctcctagataatatttatttttgtaatcgtaattcaaacggcttaaataggataccagtctgtaccttgaatcacttccccctacagatactgttttcattccattactaatggcatgtttgtcgggagttgtaaaattgtaagcttcccctgataaatagtcattgtaggtatcatcaatttcatatccggcaagaaagtccaaatgatgaatgttgttgaaagtagttaaatagcttaaggtgttactccataccatttttttatattctcttatgcgttttactacttctccattttcatcttcaccgttggaagtacgtgggtcataccatttctcaccttttacagtagtgtaatcataactgaatgttgttttgaatttcagattttttatgatttcgtattcggcataaagcgtattgaatgcgcgtagcattttttcatgtttataatcgtattcagctgataatttggggttgcggtcattggctttacgaataaatttacgattccaactgccatcttcattgtagaccggatctgaaggagtagcccaattacgtgaggaatagaaaggagatgtataagtgaatccttcgtcataaacactctgatttacatttgagaaaagtatcttggcgcctacagtcaatttgtctgttgcactgaaatctgcgttcaaacgccctgttacacgttccaaaccggaaccttgtacaataccgttctgcttcatatatgataaagaagagtaatatttaaatttatcgctgccaccggctagtgatgcttcataggtagaatgatgtcccttttggaaaagctctttattccagtctgtgaaaccacaccatggaattggagcatatttatcgatttgcccatctgcataagttttactttgtgacattagctcttcctctgatatattaggatttttatcagctagtttacgttgttgatataatatcaatccattgtaaatatattcacgtcgttcttctccccccataactgggcgataatccattgcgaaatcattgctaccccagtctgcttttaatgaaatttgtgcttttccgctttttcctttcttggtggagattaaaataactccatttgcagcacgtgaaccataaagggaggctgctgcagcatcttttattactgtaatattttcaatatccgagttgtttaatgtagacattatgtcaaatccggagtcggagctggtagcagcaacagaaccggattggacgggaacaccatcgattacgtatagtggagaattgcttgcattgaaagaacccataccacgaatacggatagaagtggaggcaccaggctgacctgaactggaagtgacttgtactccgggagcattaccttctagcaaactggagaatgaaactacgggtaaatcttttaattctcctgtcttcacagtagaagcagaacctgcgtatgccgatttcttgaaagtaccataaccggtaacaaccacttcttccataacattattatcaggagccatgactactttcagtatctttccggcagtggcttttatttcctgcttgccataacctatataggagataatcaaagtggcaggtatacggtctacatctaatgagaagtgcccgtccaaatctgtagtagttccattcgtagtacctttgactaagatattcgctccaataataggttctcccgtctcatccagtactgtaccggttaatgttgttttctgttgaggaacagcagactttttttcttcaatttgcttgatagcaataacgccgttgtgaactgaataggtcaaaccgctattcataagacatttatcaagcacattggctattttttcgttatttacatttaggttttggacttttatttgttttacatcattggtgctgtatacaaaagtaaagtcggtttgtctttggatttcccaaagaatttcactcaacgtggcattcttgaatgaggctgtgacagtggcttgtgcaaacactttgttggcagcctgcataaaacctgtggtaatgatacagaaaaataggaacgtaatccacaaacgtttactacttttaccgtgattggtgtagttgtgttttttgtccataatacatcatttttattagttatagaatgtgattgttttgttattgacttttacgtgtactttttgagtctcttccaacaaacgtacaaatggagtgatttccgaataccgatctacattgcatccgaagcgtaggtcttttattttctcattggcaaaaattacttccatgtcataccagcgtgatagtattttcatgatatcttccaatcgctggtctttgaaatgaatttttccttttatccatgaggtataaaatccggcatctaccatgcgtatctgtatgctgctgtttccgaggctgatggtagcttgctgggaaggctttaaaatacagctttctccagtttctgtatttactttgacagaaccgtttaccaaagttgtctgatactcttcctgtggataagcagagatgttgaatgtggttcccaacacttctacttgcatgccttgagtgcatactataaatggttgccctgttttgcagacttcaaaataggcctcgccttccagttccactttgcgtggaccgttatcaaatgtcacaggaaagcggagactggtcattgcgttcagatgcacttttgttccatcacttaacaatagagcatattctccacctcgtggagtttccactttattatatacaggcttgttttttgggactgtttttgatgttacttggtaattcagcattgtagagtccatgtggactcgggctccgtctattttctcaagcagactctctgtttctttatttatatggattgtctggccgtcctccaatgtcagaatagcttgggattccccaggtagaatggattgtgcgatgaactgtttgtccgaaagagaaacgggcgaggtgaatttcatggaaatacttacaaaaaggacaggtaacagaatgattgcggcataacttactattttgatatatctgcttctgttattatttcttttgattcgcttttccacttctttccatccggatgaaggattgaatgccgtatttttccggaaatgttgcttttggttttcttcatcacaaattttcttgaataaaatctcgtgcgctgtagattcttctctccaagcagttagttttattgtttcttccggggttatttcttccgacagataccttgctatgaggttggctatatagaaatcttgttttatcatattttgacctgttttttatctcttttataataaaacaggtctgtttgaaatttgggtgaataataaaacgactttttttgaaaaaaaacaaattaatgtctttttatataaagaacaagaggaagtaatagtagtctttcaagttctctctgagtttcttgtaggctattttctttaatgtatggactgtttctgtagatatgtttagtctgtctgctatttctgcgttttttttcccttccagagatagttgcataatggctttcatttggtcaggtaatttatttatggcttcagaaacgatacgataagtttcctcttcaacgattgcatcgtgaaaaaaggaatcctttttcttttcgatgacattttgagcgtattcatatactacttttgaatgctccagttcgttgagtgctttattgcgtacagctgtatataaaaatgcttttacctgatgcagataaaaaaaatcttctcttatttgccatagtttggcaaatgaatcttgtacaatatctgctgaagtttcttggttttctgtatattgattggcaaataagcatagagttacataatatttattgaaaatatcatgaaacccttgctcattaagcttaatacttatagttgtatgagaagttcccgctgccacctttgcttttaattttctctaattttagtgcgaatatagagaaaattaattaaaaacagcctcttattctattaaaatattattttaagtctactacagtaatacctgccccaccaaattgtacgtgttcgtcttgatagtgtgctactcctggaacacttcccaaatagctgcgaatcagggtgcgcagtatgcctgtacctgttccgtgaaggatacgtacacggtctattcccaatagtatggcatcatcgataaaataagttactgcctgtatcgcttcatcgccacgcataccgcgtacatcaatatcttgtttgaaatttagtttcttttcatatacccgatcttgtgtttcactgctgacgaaggtactttttaccattgttttctgggtgggctgtattggtgtgctacgttccagcttatccagttttacattggtttttatcattccgaacataactattgcatttttgccattaattcctagtacttctccgacactggattgacctttgatctttacagtgctacctacagtgataggctgttctttgggtattgacagttgggaagattccgttttggctttatcctttttgttttttttccgctcttgtttttcacggagtttttccattttccggatgatttcatcttccttgttctttttctcgatatcttctatctgatttttaaaatcagtcagttcctgacgtgccgattgtgtacgttctttgtcggcttgtgcttccttgatgatacggatggtattttcaattcgggcatttgattcctgtatcaatttttccgcatcttctttggcctttcgtaaaatctctttacgacttttctccagttcctgtagttcttcttcgtatttggcgatggtttcttccatctgtttttctcgtttgcggatgttctgacgcttggtttcccaataacgtttgtcacgtacgatatcttgtagatatttatcagcattgatatattcactccctacaatttcggatgcgtcggctattacttcttccggtaaacctattttcctagctatttctactgcaaatgaacttcccggatttcctatttgtaattggaataaagcttgcattaaatgcctgtcatataacatggcaccattaaccactccttcgtgatcttcggcaaaatgtttcaaattttgataatgagtggtgataacgccgaatgtgcccttttcattgaaacgtttcaacacagcttcagctatggctcctccaatttgtggttctgtacctccgccgaattcatcaatgaggataaggctgcgttcgttacagcttttcatcattgttttcatgttggtaaggtgtgaggagtaggtactcagatcgtcttcgatactttgttcgtcacctatgtctataaagatactgccgaataatccggcatggctacgttcatgcatcggaaccggcataccacattgtaacatatattgtagtaatcccacagtcttcagacaaacggatttacctccggcattcggtccggatataattagaatgcgttgatttttagttagttctatatctagaggaacaacctttttattatgcttggccagcgagagttgcaatagtgggtgtatggccatggtccagtccaaaatctgtttgtcttccaatgatggtttggtggcgttcgtctgaatggaaaaatgggctttggcacggatgaaatcaatttctgccaaaaactcgtatgactggaggatggcggggacctgtgggcggattatgatagagaaatctgtcaggatacggatgatttcccggcgttcttctccttccaattcccgtattctattgtttgcttccactacttcggccggttctatgaaaactgttttgccggtggatgattcatcgtgtacaattcccttgattttccgttttaatcccggtgcgacagggatgacgagtcttccgtcacgcatggtaggagttacatctttatcaacataaccttctgcttgagcgttgcgtagaattgcattcaaactgcgtgatatgcttccggctgtcgaggccaactctctgcggatgcgtaataattcggaagaagcgttgtctttgatttttccgaatttgtctaagatgttgtttatacgcgtaatgagttgaggaaacacgataatatctcctgccagtttttgtagggcagggtagggggagttttctttttcttgttcttcgtcattcgaggtcagtgtcagaaaatggatgatatcacgaattgtttctaaagaacggcgtaaatcaaacagttcttgctcatccaaatacataccttctacgcggatacgttttagtgatggtcgtacatcaaaaaaatattggtcgggaaaactgtcttcctcttgtatgatgcgcatgaattccatcacctgttccagccattcattaatatccttaaaggattctgagaagttcatttcatctactctttcttgacctaatgtgctgagacatttctcttttagtaaatgacggatggaatcgaaacctattttctgttcgaaattctgagggtatatcatgatttatttctttcgtttattattcgtatgcaaaaatacgatttgaaaattttatagcaaaaaaactggtaaactatttgcttatttaaaataaagtcgtacctttgcagcgctttcaacagaaagtacttttgaaaaaagaagtcttggagaggtggcagagtggtcgattgcggcggtcttgaaaaccgttgtactgcgaggtacccggggttcgaatccctgtctctccgcaagaaatagcgtaacaagttgtaaaacaacaagttacgctatttttcgtttaaagtgtgcgccagttttgcgccaaagatttaatagatatgtttaaccggcatcttttataccgaaatcgcggattttaaaagatgtaaaaaaatgtgtcctaaatttcgtacaggtaatacttcatctatcgtaggttatacttttcctactttacacaaaggtacaagatggttcgtggatttctttgcttttgatcctgcaaagaatgagatgcggcgtaaaaggtattatatcaatagtgcattatctgtggcagctaaaaagagaagagcagctgaaattatagaggttctgactaaacagcttagtcaaggttggaatccatggattgttgttgatgaaagtcgcggattcgtacccttagaggattgtttaaacaggtatttagactatgtggatcgtatggaacgtaaaaaaactcgtcagagttattcatcccatattaaaatattgcgtgattacataggaacgttggttactcctacaaagtttgcttatcaatttgatgcatctttctgcaatgatttcttagattggatatatttggatcgtggtagttctccaagaacaagaaacaactatagagcatggttgtttggattggcggaatttatgattgccagaaaatacataagtgtgaatcctgtagagcatatcaaggttatgccggaacatgataaattccgcaaagacttgtcggctgatatgctgaaaaagatgtctgtatatttggcggagaatgacaagttgtttttgcttgcctgtatgatgcaatactatactttgattcgtcctacagaacttagttatttaaaggttggtgatatttcattaaggaatcagactgtttttgtttccaaggatttcagtaaaaaccacaaagatgcggaagtgggtttgaatcgtgcgattatcaaattgatgattgacctgaatatttttaactatccctctgatttttatttgttcgggagaagtttaaaaccaaataaagaaagaggtaatgcagatcaatttaataagagatggcagaaaatgaggaaagttctaaagtgggacaactgttatcagttctatagtctgaaagattctggtatacgggatttggcaaacgctcagggtgtggtcgttgctcgtgaccaagcaagacacagtgatatatccacaacgaataaatatattcagaaacatggggttcagaaatccaccttggatttcgatggtaatatagtttatgattgaaaaattatttttttaatatatgaagtatgttttttttggttgtagcggtgtagcagaatgatttattaatatgtaaagtgttgaatattaatggttttaattctgatacacggtgtagcaaacggagtttttcgctacattttcatattataactaccgctctatccatcatagagccgattctattcgcgcatttttccatttttgtataaatgcaagaatgggcgaacgcgctcatagaacgctgtgggtcggtgttgtttctccgttttattttaggggggcagctcgcgcttgccctcatcaattcactgacccttacaacgactctatgattattccactctatattaattgtatggctcgtataaaatattttttcgaatatattagatatgtcttttttagttgtagcggtgtagcatggctgttttactatagctgaaaccattgataatcagctgaaactatacggctacatcgtgtgtctacagccgattctcgctacatttaatcttaaaactactgccctccctatcatagtgtcggttctgcttctatgctttctgcccctctcgtcttaaaagacaagagacgcggaaagctcgcagaacgcaaagccaaaggtggtggcttctgttacaatcccaaggtcagatttcatttgcccttgtcctttacacttcggccatcaccttccgctttgtggcgactctatgatctgtacccaccctttcattatcgtgttcaaccgttaatactatatatattctattacatcagaatgctgtattatctgtgttacttcgtaatacaagtaatatgaataataaggtaaataaagggaaataattactctgatgcaatgggattggtggtaaataataattatagattgtggtaaaattgtagtgtgtatatttgcatacataaaaagtttttcgtatctttgtagtaccaaaaaggaagaagcaatcttttaataatcgacttaaacgtctatatatttttaataagttcaatcgagggtgagcaattgccctcataataaatcagttggaaatgaaacaatacacagtatatttcaatgaacctgtatgccataagtatcttggcgttaagtttaatcaagaactcaaagagtgggaacatgatgttgaatgtgaagaagtaaacgatacatttacatttgattctcttgctactgcaaagaaactcatcaaagccaatcttgacaagtacaaaggctcgtgcatcacaaagacttgagctaacggagattgggaaaaccttggtgaaataaatatcaaaggttcaaataaaacctttgtggcaaataccaaacagagagtatctaactattaaatagcaaattatatgattaagactataaaagcaaaagcaatagtaaaagtcagtaccgaaatgggttattggtgcttggctgaaatccgaggtctgaaagaggaaacggttttagagggcagatataatcctataaacaaagcgttcgattttactttcaacggtcaagacgcaatgttatggattggacagaatggagagttaattagtgagtaagacaatacacaatttttatagagaataacaagagaatatggaaaagatattaagattgcagagattgggaagaaactattggggtaatattgcctatgaggataaggagagtggaaaaatatactttgacatcgaggacggtcattctgataatccgcagctttatacaagttccccatccgatgatattgacggagaaccgaactttccaataacaacaaaatatgaaatcgttaacccggttacaaaagaagaaaagttgcaggagaaatttaggcacgagtacatgatgctttcacgcttaaaggaagactgtataggctatcttacggatggagattggcgttatcatcaagtatctcgaatttgggcaaatgatgaaagagagcatatagatgagatgcgcagattatggaatatgttaccggtaaagcccgaatggttgacaatggagcaaatcaatgaatatgcagcacggatgattagtacctctcatactccgagtcctttttatactgcagagatctgacggactataacgaaatcccctccagctggaaataataaattatttctcccaatggcacaacccctgccattgggagattatttttttagaagaatacctatattcttaaaattatccatatttcatagtaatatcgtctataacaactgcatcactgttcctaatatctccgctgaaaaaaacagttgttttatagtcctatatattctgcccacccagtcattctgattcatccctttctattttccaaatacttcgcgcttcgcagaagtttctatatttctatccaccttccctaaaactctgcaaacagaatgcagctgttcggcaagccgaataggtacactctgttttactattttattcttaaaactttgcccgcaacggttaagccggttctgcttttcaggttgccgccactcttgcctaaagtcaagaaaggcagcagcctggcagaacgaaagcaaaaggtgaggttcgattccgtttcactccattctcacttcaccttccgctttctgacggctcaaccattgcgcccctccctattttctatatttcccttatttcatgtattaactatattaccataaaataagatattactgagtaataaacgtaatatagaacaaagggaataaaaactattcaatgcaagtggcattcaaatttgcatccaattttcccaacaaaaaacttcattttttactaaaataaacgtaggtatatttgcatacgtggtgattattttgtatctttgtattacgaattatataaagctattatagaatacatttattattgttatggataaaaaatatatacttacagaggaagcaaaggacattgttttatcggatggcttgtcaaaacgtctctataggattatggctttccgggattttggtagtgtcaaggtcggacagcttggtggtttcgtagagaacgaaagtaacctttctcatgagggtgagtgctttatttttgatgatgctgtagtgtgcgaaaatgcaacagtagagaaaaattcattgataatggataatgcaatgattttaggcaacgctaaaattactgattttgctttagttgttgattatgctattgtgacagataattcagtagtaagcggaaattgccaaattacaaataatgctgttgtgaagggaaatgcgcaggtttcggataatgcgttagttagtcaaaattcaataattaaagataaagcccaaattgaagattatgctgaaattagagataattctattatttctggaagtgcagtgataagggataatgccttgattatggatcatgcagtagtaggtcaaagttcagttgttgaagacaatgctgttgtgagtggcaatgctgttgtaatggggactttagtatgtggtaatatgattttgtctaaaggttcctttgagtagacaggttcttacataattatattggttgttgattgaccggtgtctgaatgtattttcagtgccggtttttttgcaataaactttatcatatagatgaaaagtatatggtaaaaacattaaaaaaataggaactatcatcatataatgataatccctattttttattacaattgtttgataatacttatcatagtgtctttacagcttagtatagctgcaaggaaaaatgctgctgcccagccttctaagccttcccccatagaagggagaattatggatattgcgaatagaatacttgcaatactaattgcaattgcttgaatccttgtaatcagaattccggtgcattcttctaagaattttatttctttttgaagacgagccaacgtatattggcttttgctgatttgttgtgttttaatcattttgttgcttgtttgacgttttgatataaaatgggcaccgtccggtgtcaaacaagcaaattttgaatataaaaaaataacttgaacggacgatgcccttttatgaatagtttatattttctgggtacaattcacccataaatgggttttatgtgaatgacacttgcgtgtctatgttgcttgtttgacgttgcaaagatagtaatactatttgaaatgacaaaataaattactggaaaaatatacacattaatattgaaaatgttccatatataaagtatatagaatataaagtaataatgaaaatagagagtaaaagtaattcaatgcaagtggcattcaaatttgcatccaattttcccaacaaaaaaacttcatttttatactaaaataaacgtaagtatatttgcatacgtggtaattattttgtatctttgtgttatcaaagaaggagaaaaactccttaataaatcaacttaaaccaattatatggtttagttctgacccatccgcgagaaccgaccagagcgttggcccaccgaagttggttcgcttactcggtttgactccgaggtaggcttcaatttttcaataatcacttttaaaaaaactggtggcaacaggtaaaattctgcaggtaaaacaatgaaaaattcaaacaatattcagaccatgaacaacgaaatgatgaatcaagccttagccgattggagtaagggcgactacagtttgttaatcggtgcggtttgcacattcaacgctgaccccttcctcgtggaatacgatgaacttgcccaagatgtggcagaagaagtcttacaggacggtgtgacctttaaaatcttcgaacgcaaaacgtgcatgaaaactgattccggccagcgagaagcctttattgatatgtgcgaaaaattagaatgccttgaagcgcagcgcatcgtatgcttttactcggccaatcaagccgaaatgcttttggtttgctttgcgcaagacatcgaaggagatgaaacgcccgaagcatatgagcaggtgtacagcgtaggatattcaaccgacgagtatgatttttgcaaatacacccatttaacacgcgtcaaagcgcaagatttgttcgagcagctttgcgccgatgtgcacggcgaagtgtacaccagtttggcggatcattgttccggaggcgaaatttggatatgcgacgatgtgaccgaagaacgtattgaaacgttctttgtgaaacctaaagaagattagcacctatgtgcttacacaataaagcggctggaaaaagtcgtgttttctaattcaacttttttaataatttttgctctggcccatttgggagaaccaatcagagcgttgacccaccgaagttggttcgcttactcggttcgactccgaggtgggcttctacggcattacaattttcttttaattatttcaaaacctggcggcaacaggtaaaattcagtcattaaaaaaatgaaacagcattttgtaaatcaacaaactttaaagcagctggcctatgataatggccttgatttggttcctacttgggaattagacgaaaatctgcaaactcgttacgcactaataggttttaagagtgaagcacaaatcaatcatgtgatgtccctatgcgataactttgagcgcgtggtgatagttcgaaagccgtttgataactgctggcgactttctgattttgaaaatgagatcatcgttgatgaatccttgtatgaaaatgccgctgacggtatttcattttgctacgacacttcctactttgaagatttgttgcaggatgaaatgtatatggaggcggatggcgttgatgaacattctgtttgcgaaatcattgaacgcattcaggcgttgaagcccggcgaagtggtggtggttgcaggtaacgaccatttcgttgagacactgcagactcatgtactgaactatcgcgatagcaatggatggctgtgggcagtggcgttgcgataaaaaaataactgtggaaggatatggctgacgaaataaagtatattggtgagcagctgcgggcattaaggctgtatcatggattgatacagatggcgtagcttatgccgaagttgatagtcctatacctaaccttttttcgaggtagttgagcagtaaacattctttgattacttataatgattatattatgaaattgtataaaagtcgaacttcacaaaaggtttttagtgtagaaatctctgaaacaggttttgtaacattaagaacccctgatggcagaatttataataatacaggttctgttataggttctatgggaatggaaaattttttatctaaatgttttgattataatggtactatagatgattatataagagaacagactgcaatgacagaaaaacaaaaagcagcacaatttgcagctgagataaaacgtatggaggttcaagaaaaagagttcgtagccatgattcaatcccgtgaattaatcccttatactcgtgagaatgtgcgaattttaatggggtatctgacgcgaactaattggggcttctgggagttgcctaaaatggaggtaggttatacggcttcacaatatgaaactgagaatggtcggacttttgttaatgtgaaatttgatagtggacttaaagtatcaaatgctcctacgacatatttacacaaaggttacgttccattgcgatctttggacgagaacttgaaaccttaaaatccccacccaatggctgagaactatgccattgggtgtttttatatgatgttcaacactcgcgtttcttatattacttataatatttatattactttgtaatatgtgctatatcaggattccattgctatgctgaagttgtctgctttcagcagacagaagcttgttctatttttattatcttatatactctgcccacccattagtacaccgcccttttcctatatttctactaactttacatcgctgacgcttttattcactttccctaaaactctgcaaacagaatgcagctgttcggcaagccgaataggtacactctgttttactattttattcttaaaacattgcccacaccgcaacggttaagccggttctgcttttcaggttgccgccactcttgcctaaagtcaagaaaggcagcagcctggcagaacgaaagcaaaaggtgaggttcgattccgtttcacttcattctcacttcaccttccgctttctgacggctcaaccattgcgcccctccctgttttctatatttcccttatttcatctattatctatattaccataaaataagatattactgagtaataaacgtaatatagaacaaagggaataaaaactattcaatgcaaatgacattcaaatttgcatccaattttcccgacaaaaaaacttcatttttatactaaaataaacgtatgcacatttgcatacacaagaataattttgtatctttgtaatatcaaagaggaagaaagaattcttcttgaactaattaacgaagtattatttaaaatataagcaatatgaaaaagattgagaatagcttttcggtttctggttttgtagctaataacgctgaaattcgcaattttacaacatcgtcagtagcacgtttctcgttggttcttggccgacaggaaaaagttggtgaagaaaccattcgtgtttctgcattcattggttgtgaggcatggcgcaagaatgagaatcttgaagattttaatcaaatcagtaaaggaactctgctgactgttgaagggtatttcaagcctgaagaatggactgacaaggatggtgtcaaacacaaccgtgtaatcatggtggctactaagttctatccggcagttgataaagaagatacttctactaagtaatccttcttgctatgaagagagtggctttgtagtatcaaaaaggagaaacaaaccctcaataatcaatttaaacataaatataaaatatggaagttttactaattggcattcctaaatggaatataacagagttaagtggctatgaacctataaccactttttggcaggacttctctattgccgacaaattgggcatcaatgatattgaagaaacctatgagtgtataaaatctgaatggaaagatgattttaaatattggacggaactttgtcttgtcctcaatcacaagatatggcaatggtatgagagagataatcaaaaagctgttctctatgataagttatggagggaagcggatgaaatgacctctgaatggtcggacgaaaaacaggaatattattttcaagtaacagattaaaaccacttatggggaaatgtaaaaagtttccccactttaaacccttgcaagatgactacccaaaaacaaatacagaaagtaattgaaattgcccaagaaaagggttggtacgtaagcgtggatgacaaaaaaatgtcgaacatttcatttgagtttcaacgtttcactaagtatggacaagattttaatttctatgccgagatgcagcaagggaatattgagacccttattgccgatataaaagagtattacgaggattttgacccagattatgaagcctatctgtggattggtgaagacggacatggcaaaaaaggcgcaccctatcacatcaaggatatagtggcggatatggaagacgcagaaaaaatgatatatggtttatgggaggccttgtcttttgttgcttagcaaagccaattatatgtatagatataaaaaagagaggaatagttatctatatcctctctttttttaacataagaaatttaccatagggtaacttttccaatagcacctaaatctaaagaggccgtagcaatacctaaagctcgaaaaattcgactcattgtcgggagtgtaataacgcatttaccgctttcaagtttcgatatttgggatttttttactccaaccttttcgccaagctcttcttgtgtgagattttgtagttgtctcactttctttatagcttctccaacaaagtaggcatttatctcttcttttagttgggcttccattgcatcgcgttcgggagttcccatttttccccaaacttcatccactaaatcatcagccggtgtgaaattcatttttgccatatctgttattttttatcgttaaagtattctttcattatcgcttcggctttggcaatttcctttgaaggagttttttgtgtcttttttattatcccatgagtaactatgactaaagctccttcatcattatcccaaaaagataacaaccgatagcaaattccattaaacaaagtacgcaattcccatatatcagtatcatccaactttttgaatagttctttatccataactccaccctctacttttttgatattatagactattttttgttgtgctttaagaggttgaattttgataaagtttttagcatcatcacttaatactatttttatagttctttcattcatagcctttaatttatacaacaaaggtatataaaagtttccatataagcaaacttctatgctttttttcaatgtttttggtatcataattttgttttttttcttcgggcatctgcgggtgaatccaaaagtatagggtatcattataccctcctttcattctatattttcaaaatatatcatatttacaagtaatagaagtaatacaagaaagaaatgaaaaatacctcgtaaaattgaccagatgttttgtatttgattttaccgaaaataaaaaaaatattgtgtgttcatttgcatacaataagtatttttcgtatttttgtagtaccaaaaaggaagaaataagccctcattttattttccaatggtagggtttactaccattggaagtttttatatgatgttcaatactcgcgtttcttatattacttataatattcatattactttgtaatatgttctatatcagtcagaattcctttgctatgccgaagctgtctgctttcatcggacagaatctcgttctatttttattatcttatattctctgcccacccaatagtacaccgcccttttcctatatttctactaactttacatcgctgacgcttttattcacttttctctaaaactctgcaaacagaatgcagctgttcggcaagccgaataggtacactctgttttgctatcttctttcttagaactctgcccacaccacaacgtttgagccggttctgcttttcaggctgctgtccttcttgcctaaagtcaagacagacggcagcctcgcagaacgaaagcaaaaggtgaggttcgattccgtttcacttcattctcacttcaccatccgctttctgacggcccaaccgttgttccctccctgttttctatatttcccttacttcttgtattaactatattaccatagaataccatattacaaagtaatagaggtaataaaagtaataaaataaagggaataaaaaacttttggaagcaaacgccaacccaaattgcgcccaattttccaggcaaaaaaacacctcttttatatgaaaataaacgtatgcacatttgcatacatgtagataattttgtacctttgtagtacaagatagggagaaacacttccttcggtaatcaactaaaacctttaaacgtatgggcaataaatttgtttatattttggacttttgtcttggctgtttaaatattattgaactgacagatgaagaacaaatagaatctgaacaatatgatgattttgaagatttcctctcaacaatcgaagataaatatgggttcaagctatcaaactgtcaatggatggtttcagatgaattaaaagtctataaatacgcaaatggagaggaggtttacgatgcctaattggtgtgattgtacctacaaatgtgtgggtgatttgaaagaagtaaaggctatatataaagtcttgaaatcgcttgataagcgaaagacttcaataatagagaatggctttggtaaaatgtggcttggcaatcttgttaccaaacttggaggtgattgggaaaagtatagatgtcggggcgcaataatagattattctcttgatgacgaagttctgacaataaaccaatatgttgcgtggtgtgaacaagaaggagtaagaaatataatagaagaaaaattcccttctgttaaagtttacttcatagaggaagaatcaggttgtggtgtttttagcactaatgatactagtggcttattttttccagagaaatattgggttgaaacagattgtgagtcaaactattttgaaactatggaagaggttgcaaattgcatctcggaaatagttaatcgtgagatttctccaacgatgaaggatttagaggaagcagtatctcaatacatggatgacaatgaagattgctatattgctattcatgaaatttcgtttgtttaattattattgtcagtatctatttattaggtactgacaataattcgtttattaaaccttttgggactattgatgaaataaggtttatgtgttatatattctcattcatattggatagtaatttattctatatctaataattatctcttttgaaaaagagataaaatcgtttttctttaaaactctgcccacccggtcatttttttcctcccttttttatattccaaagacttcgcttcgcgcatcactcaagattctatatttctatccatcttccctaaaactctgaaaacagcatgcagctgttctgcaagccgaataggtacactctgttttactatcttctttcttagaactctgcccacaccacaacgtttgagccggttctgcttttcaggctgctgtccttcttgcctaaagtcaagacagacggcagcctcgcagaacgaaagcaaaaggtgaggttcgattccgtttcacttcattctcacttcaccatccgctttctgacggcccaaccgttgttccctccctgttttctatatttcccttactttttgtattaactatattaccatagaataccatattacaaagtaatagaggtaataaaagtaataaaataaagggaataaaaaacttttggaagcaaacgccaacccaaattgcgcccaattttccaggcaaaaaaacacctcttttatatgaaaataaacgtatgtatatttgcatacatggaaataattttgtatatttgtattaccaaagagggagaaatactctcttaactttaaccccttaatccctttttgttatgagtaatttcgtcagtcagatttcaaaatgtgatgcagattttgtaaaatcatttgttaatttcgttaatggaaaaatgtcttctaaaaacaatacaggcaaagagctggctaaagctcatcgttatttgcagcaggaaatgtttgaagttttcttctgttttatgaaggaactggcttataattataaaaatggtagatatgatgctcgtaatgaaatggctgctcgcttttcagcagaagcctatcaacgcctcattgaatgtgattttgtttttgatcctaattttccgaaccattaaatgatagaattatggatgaatatgattttcccgaatacggcagacaatgtgagttgataaccccttggcgaggctaccaccgaggaactatcgtagccctctctgaacatggctttgtggttcagttcagcagtggtgcagaaataaatgtttataaagacgaaataattttggattgatatgtgcagacttatgacaacgcagttggaggaagccttgaaaggctttcctctctattcccaggacggcaagggaaaggaagctatttgccgtgccatctttgcactcggaggagtgcggtggttcattcttgaaggtgaaaaagaaggcaacgatacggtcttgtttggaatagttgttggcttgatcgaagatgaatacggctatttttctctcaatgaactctcagatattcaggttgatttgagtaggtttggtggagaaggctttttgaaagtaaggcagcagcctaactttactcctgttcctttgaaacgattgcaagataatcgcttacaagagttgctttttaagtttgagtaaatgaaaaaagaatgcttgtacaaaaatacacgcattcttttttttctctatatgacctatacggaaaagtcaaacaagttttcatttccatcaaaaggaatacattcagcccatgtctgatggtgaggaaccaaagtcataaatggatatttagggttgttgggatcgcatttttcaaatatgccatattgccatttcgatgtaggggattttcgaactaaaacttcttcaaacttttgcaatttgtcagctgcaaattgctgaagaaatattttcttgaaaaatttcttgcagtctactatatcatagcctttttctatataattctcaatatcaccgaaagttccttctatggggcatagaacgaagcggttttttcaatgatcggggaaaatgggtgaaaagctttgagaaccaaagggtttaggcatagtcgggaaaatgggctgaatatttcgaagcggttttttcctttacatgggcttacatctgctttacgtttgaggggcttttcttcggatcttcgggcgattgctttacattgggcttgcagatggggctaaaacggtcaggaagggctttattctcggctgtgtggccgttttttgtgcctattgggtgatatgacgcatgtgcttcctcattagaagaacttgctgatgcttccaatgacttcaaagacattcatgatgcgtgatttgtcgaattcctgctcatcgtagtcctctgtattaatgggaatgaagcgcaacttgcttggatccggcgacctgcgcaggattttaatggtacggatagtgtccagtaccactgcatagatttctccatactggatgtcgttgagtgtgcactgtcgcagggcgatgatgtcgccatggtttattttggactccatggagtgcccggtaacattgcaccagaggctggctttttcaaacccccttattacgatgttggtggcgggtatgtttacctgagagttgaacacctcatcgaatcccccaataaagtccacatcgtagtatggtgtgccgacagatgggttcatggatgtggtaggcatgaacgaaggattggcttcgtctattgttttaatgccgttcaaatcgtcttttaacatgctccccttgccggttagcaaccaagcaggatttataaaatcacactttgtgtataatagttctgcgtcaaaagtgtttcttgtgtaccaatttgaaacagcctgtgaagatatacctaaaaacctcgcaaaatcagcgtttttactcatatttaggtgcgattttatggcatcaagcatttctccttttgatgtaaacaaaacattatgtgtcattttcttcagcttttattttgcttttcattggtaccaaatccagggttggaaacatactctgtgctttcaaaatcaattctactcgtttaatttcagcatcaatgacactttcaagtcttgtacattcatcaaagtcttcctgtgacttgctttctttgtaccttttctgaactgttctcattgctacaactgcatcgtaaaactctcgtggattcataccttatacttactaaaacattatatacttcctatatggttttgttatttctaatatgggatttcatatttaattggaaatctgatattattgtttatgctcattgtaatatatttatttttctgaaaagtattctacaatctctgatcccagttgcgtaaataaatcatctatttcatttgcgatggaactctttatttctaaggcaaaactgtgaatgatggccatcgaacggagtagataaccttcattgacgcttaatgccatagtcgaaaacgctttaaatgtttctccaacgtgtgggtaattagttccgtctatatatctatcaatttttaaaaatcgttcatcttgggaattttttaaagctgagatataaaccaaatagttcaagcttggatttccatttttttccttgaagttggaaaaaggatattttttatttagttcaccgagttcttgaactatatttcttaatttttgagtaagcaactcatattctatttccttggcagcttcgataggtgagagttcttttggctctttcatatattggggcaattagatgtttaatggttggggctataccatttttctttagggtctcctttcttttaagaggttgtttattttctcgcaaaaggattgggcctctgcttcagttcggaatacatggccggcttttaatcgtatttcatcagttccggggttatcccaccattcatctgctataacaccaaaccctgtgatataatcgcaaaaataaatggtaaagtaggtctcatgtaatttcggacgataatgggtaatcttcttagataagcggagagttttaggttccagcgtagtgtaacatagatcttcattgccaacgtagggaatacattgccgatagaatgtctcatcgttcattttgaaggggtagtagtcattttctacataacgctcaaaataattaagattccacttctcatctttatggttgcgaaccaaaaccggttcattgaatgtaaagttcatagtgtattcgtgttttgtgtggtgtgggttcggtgtatttactctttcaccggcttgaatattattgttattttgatttccttcggttcttctttccatgaaggtatattctcttctcctatagattctctcaactcatcactatctatagggaagaagttagtgtctattgggaaccatttagggatgaatttacctcgcatgggcatgtgcagatagataaaagaactgccatctttatttgtggcaatgtatgccgttgattggccggatagttgttcggattgggtattcatgttaatcattgtatttgaaaaatgattgaaaacttggtattcttacggacttattcagatagtgcttcttcaattatcatttttacaatttcgtagttgttggtttgccagtctaaatcaatgtcgtggatagacgaatcgtagtggttcgctgaaacgtaggagtggatgtattctacaaatgaatcttcatctataccatattccattggaaaatcttgtatctcagatattttatcaatctcttgaataagatacctacattctttgtgagcgataaaatcgtcaacaataccatcatacaaattggtttgacggatataggcttggctgacttcgattttacagccacaaagcatacatctgtattccttttgggctttcgaggttacttctttaagtgtcgtgatcatatcatttctatgtatttatgttccctttaatcgttaatttcacaatcttcataagataccacattgtatggaacttctttgtcgtacaacataaatggattttcgcaggagcaggcatttgctccaaaaccaatttcatattgtaggtattcaagagcatcttcatacgttcctattccatcaggaacgttgatttctaaaatgagttgtattttcattgattcttaggttgataggattagaaacaatggatttagatatattcaaattctccatcgagcaggagaacaggttggcttacacccatcacccattcaccaagtttattgtcttcacccggtgggggagggagaatgtcaagaatacaacctttaatgatgttatcaaactctggtgagaaagctgtacagcataaaactttcagctttgtaggctttttctgttgtatacctgggcagcagggtgcctttttgtagaatctgttctgaatggagatggttcctatttggtatgatttcccttctataccgcagttcttgcatctatatatgtcatacagcttttttccgtattttcgggttacaatattttgcttttcccattcgtgatgacctgtttcaatactttgtcttatcatattgttttcttgtaaacttcaaaatcatatacccacacccagggatttgattcccatgtgccttttccgaatactttctcagtgaggaaggaataggcttcacgaggagagtcgaaaacagggaattgattgggtatttcatagctattgtagaaaccgaaagacttactgattttgtttgattctattttcctaataccttcggccatacagtcttcctctgatatgtcttgtagtttttctattcggatattggtaatttgaagtttggatagcaaatactcaaagtcggagagaatatactgcttgttattccaaccctttagctcgtgagcttcaatggcagataagccacatccctttgattcagacaagtataagaaatcgtgaggcttatatcccaagtctttgtaactttgggctatagctaaaacttctcctatctcgtaacgtgggcagggagctatcacttcttcgtcttcgtcatacagagtcgcatctactgctttgccttccatattcttatatacatagaaaccgcgtacttctattcctttgtaaaaagaaggacaggtgataattcttctctcttgggttttccggccttcaagtactgctttggtcaggccgtatttatcattgaacgaaattcttttcatagttatctagaaataattgaggatgtgatgaaataaacggtcaggaggaataatgttccaatgataagaccgattacaagagtattccagagcaaatctttcatgttttattcccttattttttccttgatgagaatttctgcatcaagggcttcacagacgtttaccaaggtgtttaaggaaggactggtcttgcagttctccatattgcataggtttgaataggatatgccacaaacttgtgaaagattgcgtagggtaaatcccctacgcttccggatcatgctaaggtctttggttattttataggctattttatgcgttttcttattcataggttttatgtggaactacataatctgagttttttgcttgcgaaacacggctatcaagtcttgtttcaatgatttttttgaaaatcagacatggcatcgaaatagatgcaaggatggatagggtaaatacactgatattccatgtgctacttttttcaaatccgaagctcatgctcacgaggaaggaaagcagcatccatgaaccaatgaataatggataactttttgtttgccatatattcatcagcttgtcgtagaatttagtgatagctgccagtattccggaccaaccgaatgcggaaatgcctaccaaaagaagggccataggtatagaccgcatgcaaaatgccaacaaagagaatgcagacaatatgcttgttgatagaatcagcccaggaagggccaataaaagcgtatttattgtgttgtgtttcatatcgtattttgttgatgttagtccggagttttttcgaggaaaaacttaatcatgcttgtatcatgtttcatttccaccaattttctgaagcatcgcttcgtgagttctacatcacaggctgaatcatgtaggttcaggtcgttggttccgactccaaggaatgctgccagttcgataagacgtggacgtttgaagacttctggattcttcttatcgggcagacggcacaagtctattgtggctatcattgtgcagtaagtggcgcattcagaaagattgctgagaagatagcgatgaagatggcaggatagcgtgtatgaagcatgttcgacaaaagataaatcgaatgctacattgtgacctacgaccaaatcacagccttttaggtcttgattgaatatgtatagggcggtttgaagagaagtggttcctaactcattcaagcgttggggagttaggttatttacaaggatagccttgctttccaccctgtaaggattggatggatatttgaaatagaagttctttctgctcagcacttcccatgttccgacctctacaacttgccaagagagttgcaaaagagaattatagtcagctttgaaaccggtagtttcagtatcaaagatcagaactacagcattgttaccggaatacgcttcttgccatccggcataaacaggcaattctacattttccagtgcgtcagaggggagtggtagaccttcatcgcgtttctcttcgtaatctttgttttttgctacaatctctttgattttttgctgacgttctttcatagcaagtctatattgtttctttttagcggataaaatagcttttgctcctgttatatcggggtgtacttcgctttcagaataatatactgctttggcattatggaaacaattagtccatcgttccttgccttctgcgtcttcattcaagacgtacccggttttggcccattgtagttgtgtcagttccatcgttgatttttatttaaaggtttaggaaaaagggttgtttttctccctttgattgttctttggtttgtatggttgttttaatattgcaaaaatacaaataaaatatcatgttagcaaatttaataacatgaaaatcagatatttatcaaaaaaaagaaggccattcttggcttttgcctgaaacggtcttcttcttactatcaatgatgatttactaaaagaatacttagtctaatgggttgaactggatgttgtttttctgattttctgagggtaatacacgtcaacatcgtacatctttaagatccggtagatattactcttgcctctatacccagtcttcgtcataatgtctttgatactatacccggaactatacatattgataaccaacatatagcgtttaagtttctcctcactcttgctttgtgaataatcagcttcaagattgtctatgctctttttcttctgaagaaacattttacaaacaagcagtagaacatcctttgtgtgagtttctggaaatagtatatcctgtgtatcgagtttgtcagccaatgatacaattctgatgtcttgcgtaaagcaatacttcagaaaaaatatcatatcgtggtaattgacaaaggtgttcgaaaaggaatatatgattgctgtgtcaccttcctgaaggatgtcgataaactccgtccatttttctctcctgttgtcaatatcagattcgataaaaacaggacaattcattttttttaaagaatcaataattacttctttttcctcatttcgttgggttatattcccgtatgcgatatgtttcatgattgtgtttttatctgctgcaaaattaacatttaaagttcacttaaacaaatagatgtgtaatattatattttgttggttctatttatgataatactaaaaccaaaaacccaaaaaaataggggaaaatatcaattgaataagggattatggttatctttgacgcacagttttacataatcctaatcttatatgaagaaaattaaattgtttttgaagattcgaaaatgcaaagggggcattgcttcgtttgcaattctggtgctgcccggactcgtgggttgtggcaaatcgggtgagtattccttcgataagccggaggatgccattgagtgctatcaatcctttcattcaaaactcaaagaactgaaaagctcaaacacgagtgattttggcaatatgctgaaaaagtggagagaggtaaacgatacggtaaagaaattccttgcaaaggattctgtcttggtgaaagacatggttgtggccggaaagtacatagccatgaaggattctgtaaaaaatcaaatgatacggttgacagaaacctggcgttacaattataatgacgttatgcagattaaagagcagacttctccttttatagacgatgagactctgctcgctgccgttcgtgaatatgaaccttttttcagttccttgaataccgtacaggtaaagccttccaacaagaacaaagttctgaagcaatatcgggactttctgcatgaagcaaagattcagggtttttccaataaagacgatttgctgaaatttattcggcatgaagactattgctttagaagctttcttttacatcttcacgaaatgggtaacgattctctttctgatattacctatatgacagaagatgtttgcgctaagattttcttggcagcatccgtgcgaaagattaaagcccgtgacgcaattgcaattatgtctatgagaacagcaagaagattgttgcagaactctttacgctgtatcgacaatataaatcatttgccgatgcagaactctttgcagaggaatgcttatctgtggatgattatccaaccttatatcagtattgataatctcacgatagcttccttgacagaagcggaaaaaagcaatctccgcgaaatatcttctcagttgtcaaagtccaaaaacttcgcaaaggcttttgatatagaattgcaatcgcttaactatttgcttcctcaacagttcttgaaattgtatattttatcgttttaaatttttagcattatgttacacaaagaaattagaaagttcatggcattagctccgcttacatggccgacattgatcgagaaggggcaaatggaaacagacattgcagaagattctgcggtattgttctttgacctcaatgaagcattcccggtaggatatgtaatggatgtgctggaggataactgggatctgaaactattgtatcatgcgaccttggtaaagattcatcatgtttgttatttttccaatccgcgtgatgggcatttgatgtacaagatcaatttccatacgaacaaaaatgaatatgtagaaactattattgttacgttatttgatagtatggaactttgggaagaagatttggaaacagacataaaagcgcatcaggaagagtttgaaattattgcaggagtggaaagaaaggatttgttgtctattttttgtaagctaaattatgatggataatattcttgaaaatattgcaattattatcaactcgaacagcaaacgatatgaagcccggattcctaaaaatttgcgcgaatattgtgaaataatcaatggccgaatcattaaggtgagcaaccgggttcttcgtatcgaatgtatttttgaaaagagaaagaataaggtttggtatatcttcgaaagagatatagaaaaagtaatttgcaagattgcaagacgcgacaaaggcttctccaagagggtagaagaaggttctctctcggtttacgatgtagagtgtattatcagacgttgtacatttaaaattttaaatttgaagatgacctattcagactcagcaccgattttatgaatttaatattactcatattactcatattactaagaattagaaaagcgtgtgcattgaagttttttattccctcttttaatattgtattacttgtatgggaaaaatccatcttacatagaatggttcaacttttaagttctctcctggtagatgtgaagtcccttttatgggttatatttagacctgtttcgaggttgtatgtgacttgcatatattcatgagaggttagaaaattattcattcctaattaatttcattgactatggttctaagcaatatttttttgttgattctgcttgcagctcttgtcgtaatcccaaggaagttatatggcaagcccaaatctcgtcatttttctgttcggatgatgtattcggaaaaagcccggctttttgtagcttccctcttgggtgtctcaatttgtgtgtttcacatgatctattactccatttatccattggaaaaaggattgctcgtatcttctctgtatgtattcttttgtttcatgtcaaagaaaaatatgaagttcttgatgtttcttgctaaatccgaatatccaatcctgctactgtcacctttggcgattgtcttagcttttatccctcattttttctcttgtgctgcaactcttgcctttatcgtaatctttgcctgtttctttccattcaaaacgaaagaatggaaacctaatgagcatttgaatgcgcttaataaaggtttgatagacgaagcaataagcgaagttttggatgaagacgaagaacaaaaatttaaaaaagggaacaaaaataaactcattcaagaaacaaactaattatggaaacaataacaccaacttcgatagattccacgataacatggattgctatgggtaaagatttgattaaatgcttgaagtcaaaaggcaatcatcgtctttcgcgctatgatgctttcttgtggataatcgaaaatattcagaaaggacagctcgcttatgaaaagtcaggacacatgaacgcaaggccggaatacagggtacattctttggagcgacttgcacaggaatggaattggtcgaaaccaactgtcagagacttccttcacgaactcgtaagtctgtcagccatcacactgcacaaagaaggaaacatcctcatcttttcagttggtaaaacttcatgcgcaaacctcgtactatagttatgacccccttattttcagctatgcagccaactcattcgatcggtagcgcagcccacccaaggcgaagagcttgctccccatctggagtgatggcagagcggtcgcaaaaggaggttttccaaatctctaagcctaattagaggtttttgcaaaacctcgattaggctaccactctaaagagttccttcggggagcaagctctggtagaaacaaagggaattagaaaatataaatgatatggcaggaagaaaacaagtgatggatatgagatccacaacctccggcatcagccaaatggaaagcaatgagcagcaaagaaattggtcggacgaacaatggaagaacaaggccaaagacagcttggccaactatgatccaacccgggcttcactcaactttgaagtaaccaaaggtggggtggtgcagcctattgataagtccaaaagtattgctcaaaagatggcagaaaatttggcagcacgaggtattaaggacccgaatgcaaacccaaaagccgtaatgaaaagacgaactgttgcgcagttcatttttggtggaaaccgcgaacgaatgcacgaattggcctttggagaccaaagggtggatttgaccaaaggcgcagataattccggaattactcggcataaggatattgaagaatgggcaaaggatgtttatgaatttatgtcaaaaaagtatggtgaggataacatcattggcttctatgtacacttggatgaaatgaatccacatatccattgtaccttggttccggtggatgcagaaaagaatcgaatttcatggacttcagttttcggacagaatatgaaagaggaatctttcaacatgaccaaacttcattctgaactggaaagacaagttaacagaaagtggggactggaacgtggtagcaacatggccgagactaaagctcgacacagatcgactgaagaatacaagcgtgacttggtaagagaggtcaccaatcttcaacagacaagacaggaattgataaagcaaattcaccgtaacgaaatcaagttgaaaggactttcaaccatgattgaaaaccttcagaataggaaagaagacatccaaaagcagattgatttgattgccaaacagttcggtcaagaaggtgttaacaatgaggaattgggtaataaaatggcagctttaagagaggaaatgaagagggttgatgaaaaattggccgaaaggcatcaaatgttggagaatactaagaaagtcctgcttgaagccaatgaaaaattggaggagatgaagagggaacacacgaatcttgaaaaagatatggtaaaatccgaagagagtaaaatagctgatattcagagaaatatggtgggtcagtttaacggtatgatgctttctgcaatgcgccctatattgccaactttaacacctgaacaacgtgaaatattggaggatagtgattttgccttgctttttgaaaaaagtgcggagattttaaattgtgctgtaatgttggcaagaggatatatacaattagctactgattatgcagtgtcttgcggtggtggagggggaggtccaacttctggatggggacgtgataaagatgatgatgatgatagatggtggaggaagtgtttggctcacgctactgcaatggtacgccctgcaaaaaggaagcgcagtcgtggtagataatatgatattactcagtaatacttattatttcattcccttgtttttattgtattgaatcaagaaatgtaatatcagtaataccttatttacaatatatatagtattgctgatattacttatatattggcagtaatttgatataaatcgactttgggataattgatttttcagggggtaaattatgcgtaattaaacatagggcataagtgtatttaagatatggaatagaaagaatttagaaccgtaagaattaagtagagagagggatttcatattgcaaacatgattgtgttacattttcatagtctttggcaggaggaataattacacggtctgcttactggcatttaattcatattgaagactataatagatgatggtattaggaataatggtttgtatatttttacatataagaatccatttatttctataacttattcagaatagtattatccttaaaaatatagacagatatttttatcctttgtgttagctttctattatattatttcttgctaaatttgtatggaagttttacttgtctgtattgaaccaaaaaattataatatgacaggaagaaaacaagtaatggatatgagatccacaacctctggcatcagccaaatggaaagcaatgaccagcagagaaattggtcggacgaacaatggaagaacaaggccaaagacagcttggccaactatgatccaacccgggcttcactcaactttgaagtaaccaaaggtggggtggtgcagcctattgataagtccaaaagtattgctcaaaagatggcagaaaatttggcagcacgaggtattaaggacccgaatgcaaacccaaaagccgtaatgaaaagacgaactgttgcgcagttcatttttggtggaaaccgcgaacgaatgcacgaattggcctttggagaccaaagggtggatttgaccaaaggcgcagataattccgggataacacgctgtaaatacatcgaagaatgggctaaagatatatatagtttcatggctaaaaaatatggtgaagaaaacatcatgagcttctatgttcacttagatgaaatgaacccacatatccattgtaccttggttccggtagatgcagagaagaatcaaatttcatggagaactgttttcggacagaatatgaaagaggaatcttttaacatgactaaacttcattctgaactggaaagagaggtcaacagaaagtggggattgaaacgtggaaataacacggtcgagacaaaagccaagcatcggtcattgtatgaatacaaacttgatttagtcagagaagttacacatcttctgctgaagaaggataaattggatagagaaattcatgaaatggaagcaaggataaatgatcttgaaagcagatttgagaacttgcttgacattgagaagtagaagaaattcaaacataaaatcatggtaacagtagaagaaattcaggaagcaataaagaaccgcaaacctatattttatcccaataacaggatttcctacgatgcgtacaaatttcttcgcaaagtaacaaaagctgacagggatatattgttgtcggaatttccacctttcgacccccaaaagaggcattcgctattcatcgtttttacttgccctttgtgcggaaaagagtttgaaattagtttttctaaagcgaagtttatttcttttattcgaactgatttcaattatcaagatttgtgcgaaacaaaatatccacaacataccgccggatgtgcagagtttgagaactatattaaaatgtacaagcccaaaggaatttcattttctaagttctatatgtgtcaggagtgttgcgactctctacaagatgaggaagaacaggtgtttgaagagttttataatgatcctctcttttgggtaaatacgcattctcccgaacagtgtagctggcagtgggataaaattgtcaacctgtacgcatatccggaagacttcagcaataggcctgaaggatggaaatattgtggtgtgaaatataaagaaaggtatagtaatttcaaggtggctactatgtatgaatcaaattatcaaaattggaaaaacgtccaagatagaaccattattcataaaaaggattcaactgcccaggagattatacaacaaatcattgagaacaaatcttttgagaagaaaagaacacaaggttttagtagaacacttgaattggctaaaaaactccttgatggcattatcaatgatgtagaactaaaaagcctgttagattacgttgctatagaaagtgcctatatattaaaaatttcacggaaacagcttttcccaacaaaggtatttaatttcggaaaatacaaaggatataatatacatgaagtaatagatgctgatagagattatattacatgggctttgactaatttggataatttcatgcttgatgaagaagccatgaaacactatcgaggtgaagcatgggaaatgtcaagcgaaaaaagtgatagtcatgaagcattggaaactgttgatacacaaaaacataattcaaaagtggaagaagttgatgattgtcctttttaaaggattctgattttactttattcagtatctaactttgtggaagtttttgaacaaataacaataaaacgaatacgatgcggaatttacaaacacattcacgacctcttcatagatttcgtaaatgtgtatgtaacgctatacatggactataacgattcaagtaaagacatagactgctcaatagtcttgcaagttacacctttcccggccttgtaatcttcccttgccttggcaatcttctctctgaactcttcactgattgtgtaatcttccttgtgaaccggaacaagcatataggactttttgatacctctgtgaataataatatcctcaccagcatcaaccttatccaaaatcaaagcctgcttttccctaaattctcttgttgtgtagttgaatgttgccataaatctattgtttttaggttcggtgcaaagatagtgaactaccgctaaatctttagtttaacggtagttcacctcatacattgcattctacttctatacgattcaagaagtcatccaatgattcaccctttcccattttaaaagtccgtccggccttgatatcctcaattcctctctggattgccattaattcctctcgggaaggaaagtcctcttccgtagccgcatacacaacgataggagcagcattccggcgagaaacaaaaatagtttccttttccgccatttcgaagtatttcttctgattggcacgaaattcacgtgttgtaactatctgcataacaatttatatatttggtttacagcgcaaatatgtccttgcacttcttgaacaggtttgggcttgactttttccatttggagattaccttatccgacctttttgaaactattatggtgtatgtcataaagcttcaaaataagcgtcaatatcctcatggcttctaagtgtggtacaatttccagccttgatttctgccattgcctcttctatcctcgcttgcagctccggggtaagtatgaggtcttccctgcctacattgacaagtacgtaaatctcgttctttctgcgaataagaaccggttctccgttgctcgctctggtaaatgaagccgcaagattattgcggtattctctaactgataatgctttcataatcacaacttttaattttgctgcaaagataattctttttcagcacaatagtaaatttacgtacacatttgtgtacacgcacgaaaaactcttcaaaaaccgcgcaccccctccgagggggctgtccgccatcgcatgggcaaaacggtctatctttatgaggttcacaccataccagcggcacttgtatttaagcaggatgcgtcccctacggattgtgcaagatggtggttgcgctgaacggacaaagtcaggtgtcgaaatgatttcaaagctcatcgagaaggtcttctatggttctacttggaagttcaccttcttcaatcagcttcacctgttgcaatcccttgcaaatgcgcgtggtcaaactgtcctcttcggatatggtattgtcagttttgtatcgcttcaagtcttcactacaagatttgatgaaattttcaaagctgctcatatcaactttcttcaagtttttgtctgcacgagcttctgcaatagcctcctttgtttcctcgttcggctctgtgtatctctcttctctgtatattatttcaacatcatctccgtcttttacatctgggtttgttgctgctggaggtattttatcttcacttccggagataatctcgatttcatcttcttttattatatcccagtctcttaacgcctgttcgggtgattgaccgcagccaattgcatatttgatttcggttgttaagccgtacattgctgcaatttgcaaagcttcttctcttgttaattcactcatctcgttatttatttattggggtgcaaaggtatataataaagggaatagaacaatatagagaagattcttttaaaggatttactactgtaaagccagagaaaagaagccttttttgaacgacttctaatctctgaccattgaaaaggtttatgaaaatgaagtgagtgtcgttctattttctttaatataacagaggaatttcaaatgattttacaacaatttcagcctttttgtcgagaatgaaccagtattccgaacggtaggggaaccctttgggtgattttgtttcaaaggtgatttttactttccatccattgaatggtttttgtacattctcatgttttttattgaggtcatcaatttctccgtatgcacagagaagtcgaagcgtattcattgcatccacctgacgatttaccttttcactcatctcagcatcaaattcatccacatcttggaaatagtcagtttcttcgaaaaattgattggtgtatttcaacaaacgcttggaaagttcgtctttttcctttggtgtgatgaaattcaatccataaaacatctcaggcttactgattttcgtgatcttgatagaatcagaagtaaggctgtataaagctttttctgcaacttttgtagcgcgtttgtccggactttcactgcagctgaaaaaaagaatcagactgcagcaaaagaccgaaacaagagaaattaccatgtatttcattccgaacttaatcattagtgagttgtgagtagaataatagtagttctattggcttcagcaggagcgtatgtgctgataccacccaaattcgcacctctcatgttatccatagaaaccccatattctttcaatttcttggctatgtagtttccacgtttggctgcaagctttttattgtaagcagccttaccggtataactgtctgctgcagcagaaatatgtacaatcaaattctgttctttggcgatatttgcaatttctttcaagttagaaagttgggtcttatcaaccaggtttgcagtgttgattttgaaatagaagtggatgggtactcctacagcaatgatggtctgattattatcggctattgaatcttgcatggattcattgctaagtctttcacgaagcgcattcagaccgctatagttattacttccatcagaaacaatggttgtgttcaacccattaccattgttggcttggtcttgataagcatagtgatccaacaagtaattattttggttgatatatggttctgcatcaatgattcttttccaaccgcgtttaccaagtgtgtaggaaatgccaactgatacattcaacatattatcaccaatctttccagatgttcctacacagtcaaagtgacgcatggttgaaataccgctaacttcaccgataaggtgcagtctgtcaaaaagcctatatcgtaattcaacgccgtaattcagcgcaaagggcttattatctgttgatgttccgtctgcttgtaaataaccgggagtagcagaactgttattgataaagccaaaaccaataaagggaattacatcgaatttggagataccatactcattaggttggaggtttgaggtaaggttaatcatcaaatctgcatggatatgataatatttcatcttatccaagttggcatttttgaatttgagaccttgataacctaatctcgtgccgactgccggagtaaaccatttgccgaagccaatatttaaagtgggcataattctgtcgaacagatctccacagccaaccggtttaccgacaaaggcagaagctccaccttttacttcaagaaaccaattacttgcccaacctcctgttgaaactacatcattcagataggtcggtttcaatggggctgtcaggcgtttcatttctttgtcatcatcaatatgacattctttgtaacaggcttcagctctcattgctgtcattgagcataacagcaaggatgctaataaaaaatttcttttcattattatcttcttattttgtgatgatttgtttgtcttgacataactgttacgctttgttcttcgtgaacctttgatgaagattctgatttgcatactgttccggattccggaatttctctgcccatcgtttgcgaatctcgttttctctggtcaagatgttgaactccgctgcggtttgacgtaaattgtttttttgtttgacactcaaccactcgtgagagttttgcagcttctccgagcgtgaggcaatcaacttttgaagcgattccatatttctgaagttctttatcggttatacctaaattcagtagtttctccttatatttaatatcaatccttatgtcagacaacttactataacttccatgtcctaacgtgctgatcaagacaacatgaccacccttactttctacataatctctcaggtctctaagttcagcacccgaagtaatgaaatcatccaaaagtatataatcagtaccttggttgatattaccttcgtaacgcatccttttacaaatccgagatatatctgatgctcctgtatgagaaacattggttattccgactacattatgttcgacttgcattcctgctgcttcaaacatagctgcgtatgctgcagggatcatattgataccatcacctttcatgcgatgattgtatataatgtgagcattggggtatgtttgcacaatatggtgaaccttttcatccttaaccatgtcattcacaagactaagtgctgcttcaaaatctcctttttttgcagcttcaaaagcagggtgctttcttgcagcagtagtactggtatgatttatgatggcaggaaaatcctctggccaggaattcccttgtggcatagagtctttttgatgtaaaatatagagagctgtattgtagtctacttgtacaggggtattgccaaagtacatataagcaatattatcttcagcaaaagtaaataaaacttctgaattagaaccaaatttactatcttcgaaatcgctgatgctcagtttcctgagcattttcctctattttttcgcttgtgttgatattttcttcctctttttcttcctgctttggtttgtctataattttattttcgttagcgataaacaatgcagaatccttcttattttgttcccttatatctgaaaaatcagcatttacgccatctcgtttcaatcggttgtcgatagattccacacgtgttgaaatatagttggcagaacgctttacatcaaacagtgttgttttgatgtatgaaggatcttgtttgagattggagagccatgatttcagataccttgcgctatcatctttcaaattcttttccatgccgtatctcgtagagagtagggcagctgtcaattctgctaccaattcttcacgagcataggagggagaaccgaaatgatctccagaggcaaaacggtttaatctgttttgcgctccggaagcatggctcatttcatggaacagtgttccgtaaaaagcttcaccatttttgaattgttctttcaacggaactacaatcgtatctttgttagagtcgtagtaagctctatcctgttgggtaggcttaatgggacaaacatatagatcgttcttaatcattgtatcaacggcaggaatttccatagtttccttttcgttgttgtgttggacctcttcgtattcttggttgaacttggcatataactcgggtcgtgcttctttgatattcgtctggtctatgttgaaaacattgtagacttgaagctttggatatacactataattcaatttttcgtcatccgggagatttttgtagtcatcatacttaatcttatcatgggtctctttatggactaccgtaaaggaagtaaacatgaccggtgtgcttttttctcctttggtaactgtaacgaaagggagtttgttgccttccttgtcaacaagtggctttctattatcatcaaagttaagactggaaattctctcaaacgtggcaaaacggttggagttccaacctttgttttcctgttgaaacatgagaatcagcgcattcataccgttatattcccggcctgatagatttttgggccattgaagtgcgtttttcgtaaaccaaggcttttgccagttagatgacacactttcaatctttttaatcatcaaatcggcaaatacatccaatgctctatcttcagcagatgggccgttgtttttatactgatacttagccatttctttgttttatttttgttgttcggttttttgatattctgagatttccttgacgatagaggatatgcggatattgccatcataggaggaaatagtcaagtctccaataatacttaatgtggctttgggtttcatgaagtccggcttaatggtgtcgatggaagcacctttttccgggaaacgcataaagtttacccatgtactgaagaactcctctccatgcttttctgaggaataagctgagaagatgagatagggattgccgttcttatcatttttctcttcatagatattatcgtttttcaaacgacctctgaaaatgagggaaccggaaatagcatctacgctttgaagttgttgaacttcatatttttctgcgttcagatagaaagaaaagtcttctttcttgtgaatatccatttctcccgaaacaaccacttgtttgccaatagtgagaatcgaaagatcttcttgtttgccattgtacatggcaacaaatatattcacttccttttggctgattttgggatctgacaaccgcaccgtgaggatgaatgaaaggtaagacttgtgatttttgtcagttcttaccacggcttctttggtaattgtaccagtgatgtttacttttgcgcgtatcatatcttgtagtttaaagggttattatttgcgttgaagtgtttgttcttgcgtttgttgctgagattctatctgttcgtatgtgttggacgcttgtttggagaaggtgatggaatacactatatttgtaatcttctgcttcttcatagtatcatcgctgtcactgttgagaataccggcaattttattttgttcgttcttggttagctcgtgggatatttcctgttttccgtcattgacggtgagtataggtttcccattggcattgatactgattgaggcacttttaaagttgggagtgaagctactgatgtcaactttcttgttgaataccgcatcactgactgcctgaagtttttcctcgttgcttttgtctttatccaatttcatggataacataagcagcatcattaaaaactggaaaagtcctccgaacaagccttctctctgggcattgtctaattgggcatcctcagaagaaagcagcttttgcatccaactctcaggatttgtttctccttgctggttttgaaggacagattttggatcttggccaccggctgcatattggccgagtaaatttttgccattatacaaggcttctttgttcaagttgcctttttgattgatttctgccaaataagctgcagggttgacccaagtctttttgttgtctgccgatatattgattacacccaaatgtaagtgttcacctgtaactcgtgtaccagttgcacctgatacacccaatttttgaccggcatttaccgtatcacccttttgtacgttgatttgggataggtgcatatattgcacatgggtcttactaccgtcatcacggacgtattcgacagtaaccgtttttcctccaccggtatcagttctattgtctacaccgattactttaccattattttcagtagccaataaatcatctttgcgtgtcctaatatctattccgtgatggatctgcttttgtgatttattgatagggtcaactctttcgccataaggagaagtgataaacaaagatgcttcgcgagctaccggcatactgtattgaccttgtggaaggttcatacctgtactttttacagctacggtgttggccgtgttggtggttttcgcgtttgaattatcggaagataagggatttgattcaacaccaaactttttgccttgggctttcatttcttgcatcacttgttggtcatatttgtgtaaatcgttgctttcaatgacactgacaatggttgatacataattggaagcagtagcataaccaccttttttgatggcgttggcccatcctttataatcttccggagaaagacttgctgtatatttttgatagcgattagcagtcagaaccttagaatggtcttcataactttgaccgacattatcatatttcttgaatttttcgttaggtcgatcatcgttagccagtacatagttgccattataagtgccttttactccgaaatgattattagcggtttgtgccagagtacttttaccggatgcagattctatgattccctgtgcaagtgttacagaggcaggaatgccatatctgcgcatttgctccatggcatatcctgcatattgttcaatatattgttgtcttgatgaatttactcccatttatctgtgcattgatggacgtgatacaatagactctttttgttcctgctctttaggtggatcttgacgagatggtttgggtattttttgttcttcctcgttgggggtgcaaatagctactcttgaaccacttcttatcagttttggcaaatttccgtctaaggaactggcaggaaaactggcactcctgagaggagttttctcgttttcataatgattcttctccgtctttatttccagatcaagtttttttgaaagtgtgacagcatcatcagaatatgctatataatagttccctttgcgaaacagtagaagcgcgtcagaataattcttcttcaaagccttatattgctccataatgggaggaatgttcttttctgcagtatcatgagaaacttctgactgtttactttgctcttttgttgcagtctgctctacttcttgggcttgttttgttccctcttttttaatgttgttgagagtttcagcgtaaaggctcgctgccagtgctactttataagctgagcgattatctgtcaaccaaaatctttgataaagagatttgtttagctcaatgggctgcaatgcttttccgtcaacatacgcgatgatcatgtttttttggtctttggttctaaagacgttaaccctgtcaattttttcaatgttttcctgcgtagctccggtattaaatatgtccaccttcaattcgggatgttgaagggaaagaccataatatttttgagcaagttcagttctaatgctaactccttcttccttgttcggattcttcaaggaatcaaagtacatacttatatcctgctttgaaggatgaatggcaaaaggcttttgctcatttggtcgggcaaccaaagtccatttttcattatcatctttgagaatggtaatctgctcaaaagaaacagcttttgaaacctgattttcttgcatatttctctgagcttgttcctgagaatttacattgagtaattccactgtttctcgctcattgattttgattttttctcccttctctgcttttttcatcatgccgacagcacgattgatgtcgcggaaaaggttttccgtataattgggcgtttctttgatatgtttgatgatagatggtacattctcaatcgttgttttcttcaatttagaaggcaaaccaaattcaagaagtttgtgtgctgaaactaaatcttctaccaaactctcacgcgcctgtttctctttgtcagaagacattgttccttctctgttcaaacgctgtggtacaccagtagcacgaacaatttcacgagttacggcctgtacatattccgggtatgtgtcaaattccttctgagccggaatatgaatcaggtctctgtttgcatcataatgagctacacctataccatctctgcgtataggcaggaggttttccctcattttttgaatgtatttattgatgtctatgcgtagctctttctcatcatgcggtgcagtctgcccggtatcattgatatgcgtcttatatgaatccttgtgaacaaagggaagggtagtttggtcaaggttgaaaagtgtaaatacattttctttaggattgactctgtatcgtcctttatcctcctcagataatttgttgaaactatccttggtaatcttgttttccgggttcgcaatttcaacatattcattgagattgctccaaatgaaaggaactcctttttgtcctcttcgaatagctgcattattggcttggagattttgaaaggtcgtataggcgtttgacttgaaatttccattgtcactgtgcatagccatcatgagagagtttacaggtgtaatttgcaactctttgttatagaagtgaggttgctgcttataattggtgtttagaaacaaaccattttcttttgcagctctttctaaggcttctatgaggacttctttctgtctttcaagcccggtttttttgatatattctgtttccattatattttatttttattacctgagacctttgctttgctcacgaacctgattgctttcatatttttctgaagcttgtagagattgcgattcagaaacagcgagttggtctgctctattcaaaatcctattggccaaagtattcaatggcaaggctcctttatggtaagcatcaactacggtaggggggagggtcactattctgggaacattgtcaatatctaccagtaatacattcccctctaattgcggatttttcaacctttgattgagaggttcatctgcgtactgcttatagttaactgatgaattttcttccttttgtagaccatttttttctaatacatattgggtcgacttattcagcaagttggtggctccgagcaacagtaatggtatcttcaacatcggatttttggaaaagataccacacattatcaaagcaaagggtaatatagttcctgatgttaatccttcattctttgtctggccggtaaaaagacgtataagcatctcaggtaggttcgcaagcgacaaacccaaattcttcattgtatcaacgctgcctttaaaacctacttcgctaatcatgttgttccaacccgagtaatcaccggatggagtattactttgctgattctcgttgtttgtactatttgcagtattagcatcatttgtactgtttgaagtcctatatgcttcatcgctttcggcttcatctatatggtcatatgctaccggtgaaacgacttttctgttattggcttcagctttagctgctttggcaaatgcttcatattgcaaagctcttgcagttgcttcatcaatcgacatttgtgaatctttgcctgatgccttaaccgtagactggccattgagagcagctttctggattttgtcacgatacatcttggcattaccactggcccattgtgtagccatgtgaagttgcttttctgttgcttgggatatatctttaaatcccatcttttccatcatccattgaggatgattcattcgattggttatttcatcttccaataatctctgaaatgattcatatcgtttggcttgaagggttgcttcagtcaaagatatataattggatttaccagaggcttttactgctctcttcccttctgaaacagttgcatgaattttatttctatagcttagagcattctgataagcccattcatgagccttcattagttcctcgtttgaagcttcagaaatattgctgatacccatttgtttcatcatccatgagggaatggaaacttcttttttattggcaacagcaatttctttatttgcctgtttctttttttcttctaaatattgttcctgttgggcttggctatgatccatagaatttgctgttgtacttaataatgtctgaccgataaaagaggcgattgttccttgtcccatggttacaactgcattggaaacaaaagcagaaacttcaccggccaacttttctaaagatgagggattatactctttttcggcttcttgcttgatatggccttcaagtgaagttcttgtagcagaaagcgttgcactgaatacgttgccttcttgaattttcttaatgatgtaatctgttgtggatttgggcatcttttgcttgaccaaatagtcaatcatttgttgctcaatctccggagtcacctttatccccttgcttaataatatcttatttacggtctttaaataatcgtcagctgttttgctgttccattctccgatggtatatattaagttgttatgactggctattgctgtcatgccaccgtcaggtccgatacctcccaacatatttgcgtgccaagaagactgatgtttgatcatttcctgcctcttggcttcttccagatcatgctgtactttcttcataacaggtagtacagcactgttaaatatatctttgtttgatgacatgattaagtataggtttgttttaattgttggataacttgttctcgtgtttgagcaagggctgcgtgaagaatctgcatttgctggggataatattcttcaagccattcgtccttttttatattgtcctgaatgaatttaatggcaagttctctggtgatttctattgctctctcaccttttgctttgccattaaaccacgccttcgtccaccacacaataccatctttgtcaggatatacacttacggttctttctatatcgaaactttgaatgtcgatgtcaaattccgcaagagggtctattacaccttgactttctactgccctgtcagtagcttttttttttctgcttctgtcatggaggaaaggaatacgccttgcataagagccaggtaattgagaaagtcttgaataagcaatgtctgaatccttcctatcaggccaaagctgcgttctcctaagcctaatggattcagcatacttggtatatgttcgtagtaagcacctaagcgtgaaccttcttgtataatatctcgtagcgtattttctgtagctttaggtacctgatagcggttgaagagcatatccttcatgtaggacccaaagaatctgttatacatctggtccaattctttttcatgattatcataaggcgtatgcacatcaaaatcaagagtggcaatctccggattatttccgctcatctgtttttggctttccatgacgaggttatcgcgtaccatagttaaaaattcaaggggattgatttccttaccattgaatctaacttccatgtgtaaataatcgtcacagacagcaacattgtcttcggccttcacattttggccaaaattgcagattgattctttgatatggtagtaggtaacttcataggcagctttactttgtggctgataattacggtatataatagtgatgttgaatcctttttgaatatcactggaaacacccgaaactatacctgttgcgagagctttaagccatgtgtttggacgcactttaaagtcaataccatgattgaagtcattttcactaccgccatattccttgattatttcaaggggttctgattctgtaagttcaaaaggcattgcgtaaccacttggactttgtagattcatattttgattatccatattcagaaattctttcgttatgtattaaatgtctatttttttactttccgaaggttttaatataggttgatcgccaggcttggtaacgggtctaaattcaaaatcaggcggtagttgcaaatcaccaccgggatttataataataacatctccgggttttgttgggaattgaggatcgggtttccaacttggatgattcatcggtggaatatctgtaataatatcatcataattgtctccaccgacttggctgccggttcctccagtccccccagttccttgattaccggctatcagtcctgattctttgtacgcgaagaactgaggaagacttattgacatagctaccatagtaaaacaggaaccggcataggtaagaatctttttcctggtatgagggtcgttattttgtatggcataatagatggagaatgctccaacaatgccgataatacaagctataacatatcctaatgattgaacagcaggggtgtacttataaatagaatctcctgctatacctattccattggtaatgccatcggcaaaagccaaagtcgggcttagaactaacaaaagggtaattacttttttcataatcttttaaatcttatctgcgcatagctgtttgttgttgattttcttgggtatttccttgttgcatggtttgagccgttgcttgttctttttgcttagcttctgacgtactgttgagaataaacatagccatcaacgctcctcctatttttccgaggattccgcttcggctaaacatcatgtaactggctgcaatcaaaccaaaaatgcctaaacctgatattttaccaaggccaacattattgaacatatttgaaatagcaccaactccacttcctatcatattgacaagaccagacatcatattaccgattccacctaaaaaatctttggtggcattggttgaatctgcaactccattcactacggattgcgtagtttccttaacttgttctaccgtattttcaccagtgtagccattcacgacatcatgggcaaaacctccggcaccatccgttgcgtcccggaaggtcttgccaacacttgttcctatagaatcatcagtgccgatatttttccacccggcatagctcgcaactgctgccacagcggaggtttttgggttctttatgacaaattcagcacccactttaccgccttgaatagcctttgctgtagttgctgctacaacactcgtaatttgggatgtagcttttgctcctaattttaataattggggaacaactctagttaataatgataaccacgccatatttttgttatttttttgatttcacactctttgcattgagattccaagactttaaacaatcttttgcgatttgtgccttgtctctgttatgcggttttgttccttgaactatctcattccaaacaagccccatattggtgtatttgacaagtttgataagtaagaacaatttgttattgacttgctttagtttcggacgaatgctaagaaccagtttaagtctgtcctcttcattcattttttgtgtaatgcaatctttaataatcttcacaacaccaacacaggtgttacccaaatcgacatagatgtcgttgcgtttattgtgtaaagctactgcaatggcattaaccggtgtatctcctatttgacgtgtcaagtctcccatgttatcacatagcgtatgaatctcataataaaagccgtatgcttgggctgcgtaggctatgatatttctaaaatcattaagataatcatcaaattctttcaagcaattatttacggattcaacttcgctttgtagccatacatgtccctcggtttgagctgacattgctgccatctgtttggaatactgctttgttgatgtattggtaaaacgaatgatcattccggttaaaaccgggtctatctgagcgtatgatttttgactggcaagacaaaaggatagcatcagtaataatatataaaagtatcgtttcatcttatttggcatatatggcaacttctttagcgcatcttttccaatgtgaaagactttgttcagctaattctccttttctcctgtctaccattcctgctgtggctctataccagacatcagccatcgtataatgacgaatgcttaggtacaattggtaaagacgtgcagatagtgatgacaaacggtcttccagttcccatagagattttgaacgttcggcacctgttagcatatttgtcttaccacctttagcaattgcgtttttcagcaaattacctacgctgacaaattccaatagggtttccatgtaaaggttattcatgcttagcgtagcaacaatcccttgtggattgttagatgctgctttgcgcagtttgcttaatgtcagtagtattctcattccactgtcatagatgtgagtggcagctttgagggaagaggcgaaattcgtagcggtttttaaatacttattgtattgttgttcccactttctcattttcgaaaattccgcagccattgcattctgtatgacacctgtcttggtttgatgcttaatttcgcttctgactgtttcgttaatctgttgattacctttagctaaaagggtttgttcacctacattagaaactactccatagaacccataaaaagattgagcatttgctctggtagtcatgacgaacaagagaataagtgccaatagtgaaacaatcagccattgacgcttattctgtctattctgaaaaagggatgaaggataatcctccattcccttatttttattggttattcgtgaactcatatatattacgccgttttttattgtattcgactctttgacggataatactgattaaatccatatcattctttataccaattagcttcagttggggatttgaacggtctccactgtaaatggttatggtctttatgccaaataccatctgtatgaacgactgatcttcgcgataatcaataactcggtataattcaacataattcctttgtacagaaaacagtccatgttctgattgtatttgttcttcagtgatgacatataccattttgatgatatagaaatatttatatatcatgccgataatgaaaatgcaactcaataccaatataaaaggaatgaattggggaatgggaaatccatcatagccagcaataaatattaaagcaattggaatcggaattatcaatccttcagtggcgataaattgtttccaatgaggatgtaatcggataggttgtattttcttgttcattaccttttgaaattcgtaatttttttccgttcatcacattcatcagcagatagattcccatcattgtctatgtcaattcccgaatattcagacttgctctcttcctgggtattgtctgctttgttgctttctttcaagagcagatcattccaatccttagaacctgcttccggaatttcccgaacaaacgaaaccttttccgtaaatgtcgaaatagctgtatttaatttattcttatattcatcatagtaagccaacgccttatctgcctgatattttaaatcatcaggatgtatagaaccgcattgcttcatagaatgccattcctcttctgcagcttcgtatgatccgtatgctcttcgcaaattttctggcaacaaatctgtatctccggacaaattattgtcaggttttgatagcgatttgatgtagtcaagaagttgaggacctgattctgtacttttagatttgacatagaacaattcatttttgaaattctcaacaaactgatttcctgccaaatcattgtcaaaacaaagatggtgtgtagctttcgaagcttcatttattacacccctgaattgcataacagtcggatttccaccggtggaaacaaatacggccttattcagactactgtcatgttgtgcattaagctgatagtatgccatagcatcataggcactctcaaaccatagcactttttctgctgatttaagttcggtattgttagggctggcaatccataaaccttcacttgaattgcttcctcttgctttacctttataaccactactaccatccagacgtgcgcgtcctcgttcttcaaaacccacgatgtctttcaaatcagttgatttagcatcagtttttcccggtattcggagtgggaaagaaagattcttgaagtaagttccattttcttttcgcagggttgctaataaaaaatgctgtccgaacgctttctgtgtattggtgttaataccacgatttacgaaatacggataaaactgtttgatattgtcaaagttgtatttttgaaaatgtaataattcataatcccttatattgaaatcctttacttgtggggatgatttaataataggatgaaccgttcggtcaatagggttattcaacaatctgttacagacaagattaaccaaacgataaggatccatacctgcttgataatctttaaaaagatgggggtgctcagtaatgaatgagattacgttgtacacttttttttcaggaggttggaaacaggtttgacgtgaagggtacacaataaatttgtctcctttcacatgatgaccactgctgtccggtcgaacataagccggatagcggatgccgtctttgcgattaaacacatagcctacatccatgagtaagtcctgaatatcaattctttttataaaatcatcaaatgtcagttccattgcggattctttttgtggttattatctatcttccccgattcatatccaaattattcaatgttgcatttactcctgcatcgtaagctctctttgccaaatcttccggtctttcaagtcccggcttgaaatatacaaagtcgcttttatgggtttcgtgatatatttcagggcgtggatgtggattcttgatatgggatatgttatgggctatatctgcacctaaataggttgcttcgcttaatgcggtaagaccggcagccaagaaagctcccaaattgaatttctcgcgcatttccggacgtgtcttcatatcaacttcgctaaatactttcgacatcatgcgttgacgctgatagtcatccacggccatgaatttgtcgtattgtcttttcgaaatttcgtgactgactacagttccattgattacggcactcatcttataggtaacttcggaatctttttccttctgcttacctttttgctcatcagaacttgccttggatgttaaagcggtctgttcattggtcaaagactttattttttcgacccaaatatctccaacttcaacttcacggccatgcttaccttcacgataccaacctttactctcatttaaagcttgtaaattctgtccgttaacatagccctcttcaggatttgtcgttggagccatacgagcttctgctactacttcttcctttaaagttgcatcgttattagtatatagactttcagcttgttgggtttcaatagaggaggggattggtttaactgtaatggaaatgctttccttgctgttaagcatatccattgttactttttcattgaagtcattaccgatatagctattgataatatctaaacgctcgtttatgggtgttgacttcaaagaattgtcggtcaacttcttgaaatcttcttcagataagttgtattcgaaatcctgtgtagtcccttttgacaaaaccgtcatgctcttctttgattcatctatgatgatgccgtgcgaagacaaaatttcttgccatttctcattggaaaaatagacaggagaagtaataagctctttatagggctttgccggttcggttggtcttggagtggctttaacttccggaaagatttcttgcagatcttccagaggatcacgttgtactgaaggtttttgagatcctttgtaatagtaaccgtaagcaccgcttttaagctcaccgggacgaatacgcccatcgaaatgttcaggcaccatcacggtaccgcctacacgtcgcaggtgaaatccgggttgcatggaaggacgcattcctaaatatccgggaggtatggcacgagggggggataaggtgctgttacccggataggtttcgcgatagccatgtaaacccattgcaacaaggccatttacattgcgtgcagctacaaagctacttggtacatcgaaatctttacctacaatgctgttgaacgtattataggctttcttatttgaataatttgagccaccatcagatagtgcctgaaattgtctttcagtaatcggatattccaaaacaggggagtcatgtccttgaacgataagaacatacttatcttcaaccaaagcaacttgggcacgcataccattcctgtgcaatacatcttgcaactgatacgataactcgcctctgtatctggtggccatcgcttctgaacgaatgctcatatttcacttctttagtttcctatactttcttcaaataaagcctcacggtaatccataaaggcaatggcagcagtttcagaatgagggtcgagagattcattcttgcaaaaatcgtaatattcttcactcatttcgtctgactgctgagtcacaaaatcaacggctgaaatattgccagcttgatattcctcacatagtgtttcgtaatcgggataatttttcatacttcttattttatttgtgaattatcgattttgttgtcttgtagatgatggaaaatccattgattgttcaatttgttcggattgttccatgaagtttccttcttgattttcctgtgacatacgctccagagcttcttctatttcttcagtaaaatcgctctcttcaacataagacaacagaccgctcctttttacccaacagccgtcattgccaaaagagtaatcgggaatctgaagccgaacggctctgtcccaatcttcagcattgccataaacaaccatcacaccggtttttgaaaacaaatcaatgccaatagtcaattcaacaggttggtcttcatcgaaaatatcactttctatagtggctgtttttcctttccaaaatgattccagaacttcttcagaaagattaaattcctgaccaatagaactgagattacggcctatgatttgggaaggggtatatactacattattcgtatcagggtctatttggacgaagactttgatacgttgagaagatgcagcatcattttcattgctctccataatatccgcaacaatggctttacctgaaagaagcaattgtttttcttcctccgaaaattgattcaaatctaattgctctaatttgggagagaacaacaaatttactccttcatctgtttcaatcagacagaattttgcatagcatcttgtatatccatttggttgctcaatcttaatgggaagcagaggtgaaaaagcacctctttgcaatcttaggtgaactgattcgggtaaatccaaaatcatttgagccgttaaaccaaattcttccaagatggcaaacggatagtcctcacgatgaaataaaatatctgacataatcgtttattttaatattctttgtagcaaaggtaattttaaattcggacgtgaagaacctgaaggagtaaaacctatatatttagatataagatttaatttttggttctaaacacaatgcttggtagaaccaaaatatctaaaatacaatgatttatgaattttacaagaacctatttgttcctagttggactgaattgtgtaatttcacggcatgaaaatatttttaccccttttctttctctttttttcagagacttcatttgcgcaattcaatacaatcaagcaaggaacaaataactataaagtgaaggttttagaaattgaaaaagatggcaaaacaattgatgcgagagctattgatttcttaaaaaatgaacctgaaaaatcagattcattaaaggtcgattctcttacagagaaatatgcacatttaagtatagaagaactacgattttttataaaggaattagaggctgccttggaaaaacaaaacaaacataagaaaactctccctaaacaaatccacaaactctatgaagggaaaaatcaccacctaaacatacaaaacctattacaagtcatgacagaagtcggcttgtctaacaaactatttgtaatggcccaagctgtattggaaacaggaaattttaaaagccgggtttgtcgtgaatacaacaacctctttggattatatgatagtcggcacaaagactattttcgatttgaaaaatgggaggactctgttgtcggctatcaaaaaatgattcagcgcagatacaagggaggaaactaccttcgattcttgaagcagatacggtatgcggaagaccctaaatatattcccaaaatagccaaaactgctaagtggctgtatgaagaaaacgaacatttatttcaaacaaaatcatctgtaagtagctaaaatgagggaaagaaatttggctgtatcagaaaatatttgtaactttgtgttgggtaaaagctcgatattcgtttctatgatattcgttagcgtttttgatgtatgtgttgcccaaaatcgcgttaatggtacatttaatacggtcggatatgtagccaacaatccgaaggtgtatgtattgccagaagattctatatcaactgacggtgatgaagatgtggaagcgacaaaagagcagagcttggattctataccaacaaatgtaataaagagccgtatatccaatgtgtcattcccattgaaggatatttggattacctctccatttgggatacggaaggatccgatgaataggaaaagacggagaatgcacaatggactggatttgagagctaaatatgagccggtatatgccatgatgcctggtgtgataacagctgtgtccttttctaagaatggaggatattacgtaacagtaaatcatggaatatgtgtatgctcgtatttgcacctatctaagattcttgtaaggcgtggtcaaagagttcaggcaggacaaatggttgcgataagcggaaactctggaaaaaggactaccggaccgcatttacatataacttgtagatgggggaacgaaaaaggtaaattctttaaccctgttgtgctgctcaactttgtcgcagatgaattgttgaacaatttaaaatcttgattatggaattaatcatcattatgatcatcgtgattgccattgcgcggtcagagaaacctaagaaagaattaaaaaagaaaaagcgcaagaaaaggggatcgtttttgaatatgttcttttttagagaaaaatccttttatgaaagacagtgcgatgatggtagtaaattttatgagtaatttgaaaataaatagtttttttggattcaatattgtgtgtctatagaattgtttacgcacgagagccaagtgtgtaccagttgctaatgcttgcaacatcaaggattttggcttgaaaccgcacgcaggaaagctgacctcgtgtcctaaaaagccgtggcagaaaaaaaagggaacgacagtcttaaaagctcataggaggtgtgagtaactcctaaaccgcattttgtattccattacttctttgcggtaactcactgttgatttttgagaaggagtcgatatttgttttctacaatgtcgctccttttttgataatcgttaatccacggatggttgatcattatatacaggttgattgacaagccctttccccgaaaaaaaggatgggcttgtttttatatggattcacattgctcccctaaacttttacttcgatagatgtctatagatgttaagttgtaatttgttctgtaaatatatatcgcttttttgtgctgatagtattaaatatatagaatacaacaattaatgtaaatataatttggttctattttataggaattttgtatctttgcagcatcaaaaatcaatatatcatacaaatgaaaaaaataacacttttattagcactgtttttatcagtaacttcaatctcagcttatgctgactcagtaaaagcaatagtagaaaacaatgaatcagtcacttcgaatgtacagcaaaatcagatttcaaaccagtctttagaggctgattctttaaccctggatgaacctgaatttgttaatagttattgtatattgacaagcgattctacttatacagtgctacctaaagaaacaggtattgtcggacctcataagaataaaactacaagtttgctcggtaaaatcggtaagattgctgatgcagccagtgccattggtggacttggttctgcagtaggactaagcgcaaatagctcaaaaactgtcttgtctggagtaaaggcttccatgacggctatgagcgtcagcgatgtggctgatgcagccagtgctttgacaggagcagtaggtatggatattatattctcgggtaaggcctcgtctttcaattataaaaagaatggtcaagatatttgtattttgattaaggctgaaaataacgaatatgatccacatagcctttatcgtctggttaaattttcaaccactaagaaagaaagacgtattcagtggcttcagatagattctggtgtaattgacgaagatgcaaagaacaaaggttatataccgtttcatgcagagaaatatggcaagcagtcttatttgttgacaattccttcttcctgtgttgaaaaaggcgaatatggaattgttttcatgggtgttgaatctgttcagcatataccggtagcaactttcagcatttcttgatttttatgaaattcataactaagggtacaacacataatctaatggatttttctaaatttaatagtttgtaaagtttccatgtgggttcagatttctaatcgaagtctgaaccttttttctttgtaagactttgtttgactttgggagatggtaattactccctttttacaaatgtgtgtttaatgacaattccttattcctcattgaggatagggacttgtttcttgctttttgtacatgatatgagcttagattgtttaataatagctttcttggtaaaaatagttccattcccagaaagacctgcatgaaggagataatttttggtagctccgacttgttcagctttaagagtcgtatagactgctgatatgctgctaaaataccaatctttacgttttgaattgtctatgctatgaaataagtgaacatgtacaacttttgccataaatagaaattttcagcaaatatactaaataattactatttggtatattttcaataatcattaaatatgataataatgcttgtttgtaaatatgtaagattggattgaatttgtatttttgtagtacaaaagaggaagaaacaattctttagtaatcaacctaaacctctctaaatatgttttttagaaaaatcatgaaacaaaacatgacgcaagaaccgattgtttatcaaaccggaacatatgtcaaactgattaacaaggccgagtactgcaaatccatcattgccgatggcaaggaactcatcgtaaccggaaacgaatcaggtgaactaattgtgccggaactcaaagatccaaaggtctacatcaccttcaaagaaggtattacggttttctcggatgtattcttaggctgtaccaagttaacgagtgttcctgccaatctctttgcaaaccatcccaatgccactagtttttcaggagccttcttttgttgtacgtcattgaaatccatacctgccggtctctttgccaacaaccgaaaggtcactgacttcttcagtaccttctttggttgcacgtcattggctgccattccggagaacttatttgccaaatgctcggaagttacaacattttccaccaccttccatggttgcgaggctttgacttccattccggagaagctattcgcgaattgcccagaagtcaccgactttgatgacaccttcagtagttgcagaactttaacttccattccggagaaactgtttgcaaacaacccggaagtgatcagtttcaatgcaacctttgttatttgctcgacattagagtcaattccggaaaaactgtttgccaacaatccgaaagttactgactttgaaagtacctttcgcttcacagcattgacttccatcccggagaacttgtttgcgaattgcccggcagtcaccaacttcggtggaaccttctcgaaatgcaaggcactaatcgccgtccccaaaggattgtttgttcataatccaaaagtcactgactttgaacagaccttcgagggttgttcggctttgacggccattcccgagaagctgtttgccaacaacccagaggtaaccaaattctccctcaccttccatggttgctcggcattgactactatcccggagaacttattcgcaaataattcggcagtcactaccttctccgaaaccttctatggttgcaaggcactgattgccattcccgagaacctgtttgcgaataatccgaaagccactgccttcaatttcaccttcgttggttgcacgtcattgacttccattccgaccgctctctttgacaacaaccgaaaagtcactgacttcgcctacaccttcgcaagttgcaaggctctcaccggtgagagtccttatacgatgatagatggccaaaaggtgcatctctatgaacgcaaaaactatccggagcagttcacggcaccaacaggttttcaggattgtttctatgattctaataagctgacagactacgctcaaattccaactgattggttgtaatccataactctcaatggcacattcaaccctgccattgggagttttttactgctcaccttatctgttatatttctcatattaccgagtaatcgaggtaagacggaaaatagagggaatacaataatactcacatttaatcatttacgcttcaatagaaaaagtgcaaataatagtatgtatatttgcatacatggaaatatttttgtatctttgcactatcaataatgcaaacaaacaacattaaacactacaagattatgaatgaggcttatgtatctctggaaacggcaaaacttctcaaagaaaaaggatttgatagtcattattcaacgcttttttacaaaaatgataaattggagttctacaaagaggaaagaaaaaagtattggttgcaggtagatgaatacgctgcgcctactctttgtatggcacaaaattggctgagagaaacgaaaggaatttatgtttggatagaaccagttgtgggtcataagtggacgatttctttctgtgatttgaatgtgagtgcagaagaaagcgattggattgaaaacgatattaaaaaagaaggctatcctgtatataaaaagtatgaggaagctttggagaatgctattaacatggtactcaaaataatttgattatgaactattattgatttgaacagatggtctaaacttaaatagcttagaagtttcaattccagatggcagtagtagagagtctgctatctatagtttgaaatcaataatttgttagatttgatagaaagagtaagaggattttattcgtgcaatatatctcagcatcaaaattatgaatcgaaaatttgaaattaccacagaagaaaaaataataatgaagaataatggagtaaaggttaaagtttaccgtattcgttctcttcgcaactttgagactgttaaggttggttagctcggtgggttcgtggaaaaagaagaaaatttatctcatgaaggaaactgctttatatatgatgatgcagtggtctgtgaggatgcaagggttcgtgatgatgctattgtaaaaaatagagtcatgttgcttggaaaggttattgtaaaaaatgaagcagtgatagaaaatgatgctcttttgaatgatcgagttattgttcaggataaaggattagtctctgacaaagcgagaatctttggatgtgcaagaattattagtaaggctaccgtaaaaggtaatgtgcttgtaacagataaagcctatatccaaggaaatgccgtagtcacggatgatataatcattagaggttacgcaagaattacgggaaatttaacgataggtggttgcgctgttatctatgcgcatttttaaacaatctgttaaaatatagtgtgtgcttttgcatacatgaattttaaatgttaattttgtacttaattagatacattatgccaaatagcttattttagaagtttgatatgcgaaaaaaaatagatattactgatgagaaaaaaatggttgcgctgtctgatggaacagagcgtacagtttatcgtatcaaggctcttcgggactttggggatgtgaagaccgggcagctcggtgggtggattgaaaaagaaagcaacctctcacacgatggaaactgctttgtatatgatgaagcggtagtctgtgatgatgccaaaatatctcaatcagctattgtaaaagactctgcggtaataatgaacaatgccaaaataggagattatgcttcagttatggatcgcgcaatagtaagagataatgccgtgattcaaaattatgctcaggttcaagacgaagccttggtagcaggaaattcggtagttgaagatcgtgcaactataaaaggtatgagttttgtaaatgaagaagcaaaaatttccggtagtgcaatagtgatggatgatgcagtcgttaaaggaagtgcaattgtacgcgataaatctgttatatcagggaatgcaaaaatagaagggaaaagtatcgtacaagattatgtacagattggtgagaacgctatggtaagagataacgcttggattaaaggaaacactatgattaaaagtaatgctattgtagagggagaggtttcattgaaaggaaatgtagaaatagttaatgacgaaattattgacagtcagcatttcatggatgtaaaagaaagaattggaatcagaatcgcaaaagttagaaatcatagaggattatcgaccagacaattggctgaaaaatcaggaataagttttgctaatattggaaaacttgaaagaggtacatataatatcagtatcgaaatcttggataagttatgtgaacaattaggattagagattcaattggttgaaattaagaagtaaataaaaccccaggcaagagctaaatcttgcttggggttttttatttaatatttaaccactgctacttgaagtcctttgtctttggcgattttgatcatgttagccgttccacggctttggccatcccaaaatgcaatgagagcatcagcttcagcagccatttccgcgttccggatgggtccggctgctcgtccatgacgatgccagtctgcagggtgcagctcgatatttaatcctcgttcctgtgcgtatttttcacccagggtatctgcacctttggcatgacctgaaacgatgatgacttcatgcgtctgtatcttgtcatgaaggtagtaatcgcatttctcggccaacagcgcgtagttggagaaatcacgacaaccggctatgattactttgtattttcccatactttagtctttgaatcttgaatttatattaagaagttcataccgttgaaaaggagttaattcttctaatccctttattttcccttcttttatgcgatattgaaaactccttaataagaaaatgaggtcgcttacgacttcgtagatttcagaagctgagtagttgtatggcttctcttttacagaagaatggaacatgtctacttctatttgtatattacgtttccgataagagggaacacgaatgacagacgttggcgttccgagtttgccttttcgaccggcacctatccttcggcctccatgagtatttttcttgttagtttccatatttcttaattattatatgcaaagatacaaaaaaatacttgaatatgtaacagaatcaagttataaaaaacttaaatttgtaacgtattcaagtactgtattttaaagggaaaccattgtcagaatattgggagtctcctgatgcgattttattcccttttattttttgttaaattcttgaatttcagcaatcatgtctttgacctctttgttgattttcaagaagtttccatataggattctttcgcgtgcttcaggagattcaaagtgataaaacttagggattggataattggcatagtctttttcttctttgctaatgttatccatatcgaaatttgttttgcagtagaatttactggtctgaaattcttcagactcttgaatatccatactatcaccacgtcctgttttggtcttcacaaaatctcgggcggtttgaccacaaatccaaccggttggcatatctgcaattttggagccggggaccaaagaatcgaggttttcattcaagttgatagaggttttgtctctgtcaatcgttataccttttttcagttggacgacctttccaaatatgtcattggataaccattccaaggtttctttggctcgtgcagaaccactgactacattaccaacggttgtgatgattttctgcataccggtcttgccatagtctgcttccaattgcggtagttcttgaaaaccgagagctacactcactttattgcttcgtgctgtgccgataagacggtcaatcttgtggaagtataatgtaggtaactcatccacaatgatgcttactggaatgttttttccttgtcctgtgttgacacgagtaacaagacggtttaagattagtgcattcaaagctccaatgatgctttccatttcagggtcattggcaatcagaagataggatggattcttggggtcactgactttgaggtcaaaatcgtcaccgtctttgctaaaaatccaatatgattctttggttgccagacgtgaagtaaatacgcgaagcgtaccaatcataccttccaactgttccattgctttgttttcaaaagctgtttggaatggacctaaaagtggggctacttctgtatcggttttcaagacttcaaagatcgtatcgtagctttcatttaagaaagaaaggatatggggcatatcagagtatttccctaaccaataggcaggttgtgctatgttgccattggtatcacgcacaactccggttggctttatcataccggtctcggggtcaatggtcttgtcgaagttcatttcattaccattcgcatcataaggtctcttttcgtaattgcagaaaaagtagatgcaagcagctaagaagttgacagcagaggtctgaaagaactgatcactaccgccaccaccttcttttttacctttttgcaaggattcaagaagtgtttcagctgtttcactcgctgctgcaagattggatatgtattttagctgaataggatttacgcgcctactgtattctacattaacaaagttgataatgttgaactgacaatttttgggtgtccttcctgctttcttgttaattctataatggtagtatagtttctgagccaatgtcgggaacttgtagtcataaactaccatcgaaaaaccttttgcggagtgctgccggataaacggttctatgatagagaatgtcttaccggaaccgggagttccgacaacccatgttcctcggaatggattgattatatttacccatcctttgcgaaattttcctttgtagtagtaacgcataggaatattgacagagtatttgttttctaccttctcttccatttgcgaaaaactctcattctcaaagttgaatcggtcttttaataatccatctttcaagaacttggaaatgttatctaatgcaacttggcaaagaatggcccctacaatactcataagaaaatatatccatgtgcttaggggtaatgaaaagaacgagggagaccaccgttgtttaaaaacccatatggacaagaacatcagaattaaaccgaaggagatggggtaaatcaccatcttcttggcattaaattccagatgttttttgtttttagttccgatgcaagttacacagattatcaataaggtcattaccttactgtaaatcatgtgaccatcttgatatactccccaggttttaattcgactatatatatcgaacaaaaaaccattccaaaaatttaatgaagccggattaatagcgtattcaaaaaattcaattaaaatggctacatagatgagtattctaaatattttgtatagtgattgtaaatccttactttcatccattttttattcttcttcatggtttaacctaattgtcaggatagggcgtgaggcaaaagattgatgtttgtctgcactttcaaaccggccagcacttaaactgtaacgccaagctctatctgaatttgctcctgcacattctgtactggtccaataccaacagtcttccttgtctatggggattggatctccctcacaattgataatgataggattgacaatatctcttgctaaatataattgatacatttcagcaactgaagggataaaatactttggattcagagattctgcaagtggagaacttatgtccttacttctcattgcagtggtatttttctcaccatcaaatgtagatatatcagcggatgtgccttgctcaacataggtcgtgtccgggtcagaaaaagcccaagggttatgttcttttatacaaacggcgtaggctgtaccatctattttgtcatcataatctacatagaagattacagcttcaggagtattccctttgctgagtacttcttcataggtattaatttctccatttgtacagtaaatcatgccgggtctccaacgatgccacgtttcatcttcaaagacgtgattatcacaagaggagaggagcgttattatcatacaaagtatgcctgtaattgataatttaaaattcttcatattacttagtttgaagtgggtattttaaagccaagtactattcctgtccggaataaatccttgccattgatacaaaggtcagtttttacttgccaatagatttgccatccttttcgaagagaataattgtgttcataaccggcatgaacccatcctaaaaattcgtgggtgtcgctaccgatacttcctccaaaccgaatgtttccataatggtttttaccgcgtacaacacaaggtttataggcagcaccgactccccaagtccggtagtgtttccaaaaggaatctttggtaatatgtcctacacgagggtcttttgcatatttaatatagccgttggcaaaatactcccaggcattgtgatgctttgtttcatgttcaactccaattgtaaaatcaaaacctctttcgtataatgctcctatgcctaatgatattcgattactgttggcctgagcattcatttccgtagaaatgaatgagagacacagaaataagaataagattttaatattcttcatatacttattatttagttttcatataataataatttgctgaacgaatctgctcccaatacatcttcatagtcaatattaagactgattgttcgtccactgatttgtttctcactcatttcaatagtcagtaccttatcattggggaaagtcagtttttttacaacgattacattgcgataccctttcagaaaagactccgtgttgtctaaaacaagggaaggagttaattctatggtctgaacattcgtggctttagatgtttttttatcattcaatttcagtcggagctggtctatgtcgaaacggatgtttgtcttgttctctatcgagaaatccaagaagaaatattccccaacactatagacgttgtttaagcgcatgaccattttgttatttttggtggccacatttctgtaacgtgccggtgaagtccaaatttgtcgggcatagcgaaccatatcttcagtagacatacttactgccgggttgttataagctgtacgttcattaacttctatggttttatcagctacagcttcttcaactttggatgtataaatcaagccatattgagtccgatagcgttcggtaacaatggtaacaatggcaaggatgtcaccatcccgatttacttctaccccttctttaggttttaatcgaacggtgttattgataggctgatcacctactaccttgtgtgtgctgatgtcgacaaagcggacaggttccgaggcggttattacagtcgtcacgttttcattaaccgtaataagaggcatctcgttcaaacatttttgagcaaaagcctggagtgaaaaaagaatgcaagctacggcagctaagaatactttatgtagtttcataatgttctattatttattagtttttaatattttttgaattgatgagatatacttgggttccatatttaattttcactttgttctttcgaatattcttcgagagcgcactggttgttttctgatacgcattctgaagggcttgcattccccattgtgaaaaagtattatcacttgtggtactattgaaattcatgctttgatctaaagctccaccactgatgtctttggtggtctctctgaatgaacttctgggtacatacaaaccttcaagaccgtccatatcatagatactcaggttgatttttaccaattcatcattgaagagtacactggtaacattgcccttgacacgctgttggccgaatccactcatggtacagtaaaggtagcttcctttgcggatagtacgctcacctatatcaatgtcatcaagcaagcgaagtctgactctgcttccatcaactgcttttatatcttcatcaacgatggccttgatcaatttgtggtcaggttcgttgttattgatggtattgaaataatctgaagcttcatcatgcttctttacgacttcttccgttttgtcattttcatccaagcttttgaccgcattgacattggtttctattacttcatcttctttgtccttagattggtttctttgcatagaggacttgatttttcgtgctgcctcagaaagttcgtcatcatttacttcctctgaggaagtgttttcttcttctttttgggcttcttccaaggctttacgaagttcaaggagcttccgctcatcttcgcttagatccgaagaactaagggattcatctttcttttgctgattatgaatcctattcttgatttcctcaatctgttcggtcgtgtttttggatgattcactggtagaatccattgctgccagttccgcgtcactatattgagattcgtatttttctttttccttttcagttcttccttcaatattttcaacagctgaaccatctttgattttaccaaagttttcgaccatattctgatatttctgaccgataccatctcctttgatattagcagatggaagtttgtcattataataatttgtcgtttccatcttacttgtttcaactggttttaaattgaaaaaatcacagacgaaatatccggtaaacagaaggggtaaatacacaatggccggcagtacatatttaggttgccggaagtttattttatctgttatattcatattctactgaggttgttattctaaaacagggtcctgagattccgaaacggcatccgaactgttttgagggttatggtgacgttttaacttcaaatactgttcttgcgtttgaatgacactggaacgagttttaggcatatttacagcggttgataatctataaaggtttaatcctatacaaaacagtacaatgctgaaaataatccctaagaatattttaggatacgaacttgcaaaggtttgaacttttaaagcaaagacatccagtttcgtttttcttgcaaaactggctcctgcattaaaactctgttcatgtagttccttgtatttcgggtcattcttatcaggcatatcttcgcccaatagcattttttttattttcataatttaatagttggattttgtacgttgttcaatatctttgttcagggttgtgcgccagttgacgataagcagtccgtgaggattattttcagttcttggtacacgtttaagataaccttctgtaacaagttcacgcatcaggattgaagttcgcctttcaatgcgctgtcttccgtaataagtgaaagacatatcttttttgttgaacttcacgctgtcacaatagatactgaatactgcacttgaagccattacattcccatagaaacctttttctttcagagcattgtattgtgccaatccggactcatcaatcaaatacatggctttttccatggtatatttgatatacttgtcatcaggagccagggtgaaaaagaggtgatgaaacatttccacatggctcttggcttccacatccaaggtttcttccattgttgagcgatttactaaaataggaaccgtaccatccaatacatagattttcttctgcgcatcattgaccattgtctttgcagtccaaatacttcctaatgatataatagtacagccaactaagaaaaggctgcatattataagtacaagcttaatcttattttctaaatttttgattaccataaactatttattttgaaattaaataccaattcttcttgaaatatgactactcatcgtagtacttacaccttcgccaaatgaacgtgcggagaatgaagtttctccttccggtaccatccatgctgcaagatccggcaccaagctaagacatttaagtgatacgacagatgctgccatcagataaccggctgtaaaaaatgagttttggagataggccgtagcagtttcctgatttgccgtaacagctgccaaatcgttgtattggatattgataactatatcgaacaggagaagtacatagaagcctacgaagtacagcatggctccgtagaaatgcactgttaaatacctgataatccatttagcccaagctccttcccatttgggtagaatagaaaaagcccattggattggaccgaatatagttaatacacccaagagaatttgttggcagtatatagttccccaccatcctattcggtaagtaatcagtgctataagcataatgactttatcgagcagcatcacagttccggctgaagtcgaaacaagactggccttgtaaacattcttttcatcttgtgtcgcagcatctatatccgtggtctcttgtactgctgattgagtcaataactgtcctaacttttcccgagcttgcgcgattgtagctatcgggtcggaagttttttctcccagttgaaacataagctgttgcacatcttccattctatcttcaacctgggctgcttcagcttcatataaatcatgggtataagatccaatagcgttgggaacataagctaaaaaatccagtacacaccaatttgtacttttgttacctattccggttatttgcggtgggtaccaccaacaaagtataatgctaattgctagtggcttgaatagtttcatgatgtctaaaggttcttttttaatcatcattttgtacgccatatttgcacacatgataatggcaaagagtccgcctaaacccattgaaatctgaagaatgtaccaaaacgggccttgtgaaccaatcagtgtttcactcgtgagaaactcgtttgtgcgaaagatcacatcgtcaatttcactttcaagaaggttaatgccgaaatctacggctgtgctgtcattcgtcatatttttctatttttgagttgtcgttttagtttgaattttatcagtcactccaatccatctgttgtaaccggcaagtgattcttccttgactctgtgagagatattggaagacatcacattcaagactctattggctgcttttttcaaagtcagagtttttactcgatccacgagcagttcattggttttgcagatttcatcataaatggtcatatattgtttttggcgttgagaatttgccaaatatgcctttttgatggttttaatagcaaaatcatactgatctgcaagagatttccattcttctatttcatcattctttgtctttccactgagactgttgatgttatttctatactttcttaatgtattatccagtttattaccgattgaagtccatgccaaatcaacttctctatcagccaaattcaacgcttctatctttgcccttgactttaaatctgcttctatgctatcagcaaattctacctgtggtttcgaacttaaataggtcgtcatacgcaatgagttcttaggagaagttggaaggtatgctgtcttcttgtaatttttatgaaacatattatagtaaaagtcaggagtcaaaacgcctgcccctaactccatcacttgaatttgatttcgttttgctacatcaggcaagtacgtcatactctgagctgttaccttcgtacctataataggcaaaaggaataatagggaacaaataactcttttcattttttttgctgtttaataaccgattatattcccattctccatccatttttcaatagcatctgtagctatctgttttatggtttttgaacggtatagagctgatttccaatagcaggttctcacttgaatgaactgccatgtacgaaagtaggcattgtttactatatcttggattttttgcagagagtttgcaatagactctacaatgaatgtcaatgtagcagtcgtgcaattcacttgtccgcttgcataacctcctataatcacaaaatcttgccaaatgttcttgacctcagtttgtatattttttatagcccttgcattaacagttagcagcaaagtgtctgcagattctattttacctcgaagtaaaaccttatctttgtattccttgataagtttttcatatttgccaagcttatcctttactacatcgcaagttttatatactccgaagcctgtctgtacagaacttagcactaagtcaaggacatcaaaagctctttcgtatttgtctaattctacatttatgtctttgtagttcctatttgttgcagcactggttttgtgaagtaatttattgctttcttccaaaacactgcgtgcataaagaatagcgcgttgctttttgtggtcacggatgtatgcttcaatggtagcaacatctggtaccaactgggcttttatagtattagaggagacaaaataaagcaatagcataagaataaccttgaaaggcaaaagatgcttcttgttttttattccctttgattcttttagtttcatattgtggttttaattttgaatttgtgtagtggctgcatcgggttttacaccgccagtaatcatccatcttttatggcattgttctgcaatattcaattttctgtccttgtctgcattgagcttggggataaaactcaaaaaccaatctttgaccgtgtatttgtaatgcaggaatttttcaatgagtaccaactgcgtatgtatatctgaaagacgtgcttcaatatctcttgctatatccaaacggtcacttgcccataaaaggtgtttcacatctggagtatcgtctttttcaacttcaggtgttttgtatagttcaaccgttacttcgcaatttggatgttgctgagccaattgactgagtttgtcatttaccagcttgctgttttctgcttctggacggttggggtcaagatccatttcttccgcaatggtagtttcgctccaactacttgttaattcccagtctatttggacgatggcacggtgaattttgatacctaaaaagtatttgggctttcgggctatcttcacggtagctttgaacgtgacatcgctgaaatccttgccacccattgttcctttccggataaagctatcaccttcccaatggccttcttcagaccaagctatttcataagcacttttcatgcttttcataatttgtggaatacgattgtagtcgtcagtttgtacttgttcaccttcttctgcttctattatggcttgttctacactggtaatggaatgtcgtagtccatcatatttcaattgtttttctttgatggtttcctgtattttgtttagctgctcgcggtatttgtcacgttcttcagtcgttgtggctgaattgagttttcttcgaatctggtcatattctttatttaactcatccaattctttttgaagtacattcgcttcacttctcatactctcggcttgtttttttaactcggcaatattctcggtaatttcggtttcgttacctaaagtggttttcattgcacattgtctggtatgatcatttacggtttttccacagctacggcatttgtaggaagtactacctttgcctaatacaccaccgtcactacaggttacaaggaaagttgcagaactggctccttggatgtcccggtcagttgtagcttcataatattttctttcatcgtaacctattttgtaggtgtaatttttttccggttcaggattgttcaaatcatcgggattacttatatctgtatgatcgccattcagattgtattgctctaaccgagcattcatcatagccataaaggtattcctgtccattttataactgtcgaagatttcttcataaacaacttctttaatgtcagtatatttatagacttgtatgtcataagcatacgcttttatgataaaaacgcggctaataataggatcttttatttctatgattttctcattgagattcttgaaaaattcatatctatatccttttcctatattttcttgattcaattgctccactttttttcggctccatccggcttgattttcagaattacggagaatatcttcctgctgactttcattgggaaagaagttttcgctctttttagggaaaaatctataccagtgatcgcttttaaggacactactttgatctgttggtgctttataatcacatatcaaatccgtactcttttcttcacgatagatataaactctttgagtgtagaattgaccattggcagcagatgtaaaatcatcagcccattgagttgtgttatagtcactcaaatcgaaaagatcctcaatattatcctttccggcaaattgattgacaatttctaaggctgatttgtctttcatgtttgaaaacatatcgtttgcatttcctgccagtgtaataatatcacctatcttgtcttggaatgtaccaccaaaacttgttccttgaagtagtttattcaagttgctattgaaacctgatgcagctaaagcagctcctttaacaacaaggttctcaatatcagccatgaagttctctttagtaaaactgttttgaatatcatcagagatggcttcaaaagtagttttccaatcaacttctcctaatttggtaatatcaaatacttgtttgaactggtcggcaatttccaagaatggaaggtccttaaaagatagtttaccattggtaactacactctcaaattgttgacataaggattttacatcttgcgttgtttttacaagataacttccccaatagatagccgttgatggatcctttaccatcaacttggctacatctattgttttgggaataatacctctactcactatattataaattcgtttataataatagttttcatcggaactccatatattaacattggtcaaagcctttctgtcgagatgttttacaaaataaattccggcagctgcaacttctgctcccttatagctttgacgaatctttagaaggttttgattatgctgtgattctatcaaagaattggtttgaaaagcgatttccattgcagctaaagtctccttgtcaacattgatattttgagcttgaaaaggaaaacaataggcgattgccagaattgtaattagtataaaacgtctcatattgcttttatttttgttttaaattcagtacatgcccagtttgatttaccttttgagcaaaagccaaagatttgctaataccggatagattccagtcgcggcaatacatttcaatagcttcctggtggctgcatttaagctctgatttatagagtttcaatgcttctttctcggctcgttcggtagtgtaggtcatataacattctctgggttcttcgactccatagacatcacttgccagtccgcgccgtatgaatacctcacggaagaaacttcttccatctttattatccaatcggttgattgtaaatatcttcttgcattctatatcagtcagacctaaaacggattgaatttgatcaaatcgttccttgaatttaccttgatccaataaaattgtcacgtctgaattattgatgatagcttcttttacaataggactaccgataatatcctgcaactcctgagtaacgacaccaaccattgcccaaaattttcgggctgttttgtacaaatatttgatgtattctgccatcatgggagatgctactgctttccatgcctcttcaatcacaaggactttgcgattttttttgattcgcattttctggatgaatacgtccatgataatgagcgttacaagagggaacagagtcttattatctttaatcgtatcaatttcaaagactatgaaggtttcatcaaacaaactgctgtctaagttttcattcagcgtgcgttcgtatgaaccaccacgataaaattcagaaagtgaataattgtaagacgatatatcaatacctgtaatcttattttcgttgcagatgtagggtatgcgttcggtactgtattcgaagaaactgttgaatgagagttctttcacgataagagcttttctacgggcttccatttcatgaattttatcccatatacgcttttccacgtcttcatttgtgtctgaaatgcgtctctcagtggccgtatctatcaatagttttttatggagggcttcaatttgagtcttgttatagccgttgaatcctacgaaataagcttcataatattctttgataacttgttctatcagcaactcttcaattttggtgggtatagcagagttacccttccaaatgagcataatcagatttttcaagaagtcaactttctcaacattcaattcctctttattgatttggaatggattcattgtgataggatgctcttctgtatagctgatatatttgccacctacatattcgcataaaccttcataggagttacctgtatctaccataactacgtctgttccttgttcccaaagttgacgaacaacggagttcatgtgaaaggatttaccggaaccggagggaccaagacagaaaaagttcgagttgtcggttaatttaattttaccctcttttccggaaatgtcaatagctactggcacgccctggcggtctgtatagtaaacctttaatggggtgtcttcactctttggaagtttttccttgtacattaagcaggatgctgcatcgcttaatgtaagaaaacggtcatattctttattcatagagtaacagtttcccgggaaactgcctacgaatagttcaagttgattgtaagagtgctgagaaatctgaataccaatacggctaaaagtattctctaagttattcgttactttttgcaaatcggtattattatcaacggtaatcactatattgtagtgacaataaaccagttgcttgttctcacgagcagtaagttcttctaccttctttatatcttccactgcaatttcattgcttggatttggcaaggaactatgacggttctttttctttgccagttttgataattcctgtctttgattaggtagaaaaatgatttgattgaaaactacatttacagaatcaggaatgctgtctaacatagacatcaaatctaccggcatagtgacattgttgacatctatatttgtataaggcttgattagttccggaacgactatgcagtcaacatctactaagctgtaaatcttgaattttttggaaccaataccaatatattcgtccgtcactttgtagttgttgtgactcagattcttttgtgtgtagttttgggtataatattgattgatgaatcgcttggcttcttttttattaagataatgagcgtcaatgcctctgtcccggagttgatcttgtactttgccgagttttacttgaaaatcttgccattttttattgtcataactcatcaaacggcttttcttattctcctgagttatggtgaggtaagtaatgcaatcggtatattctcgaccaccaaaatagcggaaataactttcacttaaaaactctttgtttccaccttcggcctcgaaacctttacggacgaatacatcttgtttgtgaatcgcatatccttcgcctaatgtagacatcaaagaggtgagcaaactggagaaggaataatactcgttaatgtcagcacagtatttctgtacaggatttacgatttttacagttgcagaaaattctccggtttttgtatagtacacaccgataccgtctacttcctctatcgaaaagtagatttccttaaagattttagcttttttgctgccggtgccaaatgctcgcactgaaatagccatacctatacagatggcagcaaaacacaacaatacatatactaacattatctatttctttagttgtagtactttaaaaaaaaagtaggctcaaccttaaagctaagcctacctaagtcgttttcattttcgtaacttggaaaaggttttaaagtcgctcactgtaggcataaataaaaacaccttttggattctttttcgaatataaaccctttcgctgtttaatcatgatgattccaacaccagtactcactgctattactaatacaatcagtccgaccataaagcctaagagggtgtatgttataataaatccgagaagacttattcctgctgtaatagcggcccagacaatataacgtccttgaagacccaaaaattccaaagggcgttgaagccctttgaacatttgaaattctggattgtttggttcagccattagatgatagaattatccacctacaccgaagaatgcaggtaaagccttagcagctgcgatgaggaagatgcaagatcctacggtcatcatgatcttcttcttgacatcctgctcctcgttattcatggcaatgtacacggaaatggcaccgatgatggccacaataccggcaagtgcgtagcacaggtttgttacaatagggatatattttttaagttcgttggtaacatctcctaatgctgttgttcctgatgcgtagtcttgcgcgaaggcagtagcaggagtaagaattttgatacacgcagttaaaactgcaacttttacagtaaaagcagcattcgaattttttgctttcgctgtactccagatttttttgaagttcattgtgtttaaaaagttatttagggtgaataaaattttatcagtttattagattccaaaactcaaattctcgtaaccaaaaaatgctggcatcacagttgccgcaccaattagaaaaagcagtgaacctatcaacatgaccacactctttgttatatcgccttcgtgataattcatctttattgcaatttgcaaagctgaaattatggaaaggatagcagctacggcatttagcaattctacggcatactttgtcattgttcctacaaaaacagctgcattatgaagttgctgggcacccaatgagtaattaacagcaccacaccttgctgaaactgtcaggggaatgaatatggccatgaaaaaaaacaggcagagtaactttgtattataacattgtaatttcatcatgtctctcaatattacaattttccttattttctctcaccattttagtcaattcctctggagtcatcaatccattttggaatagttgaacattttctaatgagttgttgatagtatcaagaatttcagtcacatttttggaaggctttggggcaaatgttttattaactgtatacttggtagttcttagattctcatcgaataattcagaattactcaaatcttttcgaggagtttctttgccaaaaacggagctaatatcttcagcttgaaacattgagttttcttcctctgaatttgccgattcttcttcagaagatttttcagcatccttagcttcactatctatatctgattcttgcggttgtgttgtctcttgctgatcggttgctttatcctcttcttgattttgtacttctgattctgaatcttgattttccgagtctttatgttcctcttttaactcatcttttccagattctttctgatatgtgatttcttcaggtgcttcctgaatctcttcattttctttcgggtcttctgtattatttacaaaactaaagctgcctgaagacgtttcaacaacactttgcggagtgtattcttcatcatcttcttcagtgtcgtcgcccgaagctatggttagttcattcttattatccttcttattctttgcattcaaatccattgtaatgagcgtgatgtagtaaagaataagtgcaatggttagaactattgcataaatcgaaaatggactcattttttattattttgtagttattcacaattgattttcatgacaaaattacatagttatttttgttccaaaggaattaagactacggaaaaaccatttttgaagcaataatttttttttggttctattttaactatataatgaaaccaaaatgctgctaatcaagtatatagattctggttagatgaagggttgactaagagaatatatggtattttacagggtggaagacttaacttcgttttatcccaaattcttcgcgtaacattttcataagggcattttgagcatggtctctggttttatcaccggtgaatatttggtcatcatagaagcagcagcggtcataaacttcctttagcttgccggtttcaacaatcttatcaacggctaattgggccgcattgtctaccggatagcccattgcattaaacacccatctgtacacataggtatattgcgagaattggtctcctttttcctgtcgtggatgaagggtgttgatggtaaaaacaattgtatcagctttcggttttctgccttttatgggattcttgcaaatgagtttgtagtcaaaccatatttcggattcgctttctttaattctctgctgactgggacgaagaattttttggtctatctgagagttcgaatagacttctgaaatacccaagtctgttctaaactgttcaataggataataatattctcttcgagcatgttggctgcaaataattttatatatcctcttggtgtaattgcctcttaaactcaatgctatggattttgaaaaccgcgtgccgcctacaccgactccataataaatcaaaaatggtatggcccagggattgatgttgatagttattttattcgtgttctttatatcatgtatggttgtaatgacaacgcctgttgtctctattgtctgatgaatgcgaggatgaagccatctgaatgaaaatagtttcttggttaagtccagagcttctttatatactttctttttattgtttttacctcctgcttcatcacaagatatagtaacatagggttgattaaacaaatctcgcggcaattcttgctcacggctcatgtgcttttggatattgtcgccaatcaaagttagaagattttcttgccagtctgtcacattgtattgcccaaaagttacattattgggctgtatcagcatgatttcttctttggaaggaggattgaagtttagggaatcgtgatttgtcatgattgaaaaagatttagtgatgtgatttcaatgaactaagaatgggattcagcaaagttttagggaaggtggaaatgagtgcagacttgataagtctatgttttagatataagtgattgatatgcaaatatatatattaaaaataacatggaaaaataataatcattttttattggtatgattagtattttgggttctttaggtaaggctgaatttagtattttgggtatcttttggtcttggattttagtattttgggtattttccctcgtatttttttgacttgaaatgcttgataatcagtcgatattttgttaataaatctaatcttacaagaatctctacaaagactatctctacaagaaaggcaaaagtggtttttatttaatgatttatgagggaataaataaaaaagggaaataaaaaatgctacgcattagccttccttcgtcaatgctttagcttagatataaatataagaacctacctacataaatgtgggtaggtaggttcttgtgaattaccgctaaactaaagatttagtggcttcggagatttttcctgcttcttcctgccacggctttttaggacacaaggtcggtcatccacaagaggatagtccaatgattttgatgtcgtatgtactattgaagtcatgctacggagttcgtttccgtaccacgactcaatgcgccctgttgcgtcacgttgaacgcaatcgcgttctcggggagagtgttggtgccgtccaacaactcgtcacttgaacagctgctaaagctgccactcattgttgctgcagctaacatagccatgcagctcaggcgaaatttacttttcattttgttgtaattttaattgttgatgtttgattgaatttaaataaatcttccttgccgaagaagacatccttgtcttctgtttcggcggaaatgacaataccgataaaggggttgtcctcaacctctatgactgttcctgttatccagccttccatccgggtcaggtctggagaaatcaaaaccttgtctcctattttcatgattggtgtattttattcgacctttttcaagtctattgttacaatatatttttcgtttgcgctatttaggtgttgtttaaaattaaaggtcctgaaaaagtatgtggtggaaaaattccaccacataggagaccttataattctttattgcttataagtacaaattgaagatttaatcttgaaatttctgccaaacagaaggcatatttgcatagtccgtcagaccggtgcaatattcgaataccccgaaatgcaatccgggttcttcaaagagttcaggatagagttctcgttcgtacagatgtacttttttcccctctactaccgtataaggtgattctcctttcaatgatgtacagttggaaaaaaggcctgaaaatacttctatcttacggttgttgtcaaagagactggccggaatagaggttatgaaactgcaatcggaaaaggcataactgaaatcggtgacgttcgggttgtgagcaaaaagagcagagggtattgaaactaaccttttgcatgcagcaaagctacttgaaaaatcagtaactgccgggcagtttgcaaacaatttctctgggatggactctaatttacggcaattgtaaaacagccatgcaaagttctctgctgcttgattgtttgcaaacaaatcttccggaatggcagtcagagctgtacaacgaaggaaggctcctgaaaaactagtggcattgggatggtttgcaaagagattggcaggaacactcgttaacttggtacagcctaagaatacatccgagaaatccgtaataccttctttgaaggtgatgtaaatcttggggtctttgagttccggcacagtgattactccactttcattaccggtaataagttcctttccatcggcaatgatggatttgcagtactcggccttgttaatcagttgcacattggctcctggcatataggaaagattgtcgtagtggggaacttccggcttttcttctgggggatattcactcataatgtcatcatcttcacttgaacagctgctaaagctcaaaacgaatgtcatcagcgtaaaaatggccataaagccaacattgatatattttttcataattggttttttaaaggtgcccacctcaaaggtttttgtattgcatgtctttaaaagtggacaccaagtttgttttttgttaaaataattcttttgcgttcttcttttgattttcaaaaacctcaccatgcttttgctcatagaggtctatggccttctcgaaagctgctgatacaatgtctttaataggcaagccttctctcttggcgatgattcttattttttttaacaactcggaagaaacgatggtgcaaaagcgttcttcactctttgcacgctctttttctttttgcttctctctggctgtgccttgttcaacagatttttttattacaggaggttccggttgcggaggtgtctcttgtttttctgtaggttcatttttcgtcaagcctgagaataaagcatctaagcttgtattgttcatgcttttttcttattagggttattgtatgtgagctaaaaactcgtccgtaaaagctgcatagtctttagctccattgctattcttatcatagtcaagaatgtcttgtcgttccaatggggcttcggccaagcgtacattcttgcgaatttttgtttggaatacagtatcaccaactgcttcgcgtaatttggcttcaataccgcgtgaaagattgcttgtttcccaacgagtaatgagaatgccggaaatgtgagccttcgggttcagccttgtactaaccatattgatgaaatcattaatcatcgttaaacctttaaagggtaacacttctgagataagaggaataacaatatctgttgatgcggtaaacgcattcagtgtcataagccctaaagatggggggcagtcgaggaatacgaagtcgtatttttcctctacctttgctttttgtaggacatctgataggattctttctcttgctatcgctgtggaaagttccacatcaaccattgccaaggtcaaagaagcaggaaccaagtgcagattttcattgagcgaaacgataggaagttcttctactttaccggtaagtgcatcatagatagtaggaccttccgtaggtgcagataaggacgtagtgaggttagactgagcatcaaggtcgatgagtaggactttatatccttttttgctgagaatgcttccaagactggctactgttgttgttttacctacaccgcctttgtgatttgcaactgcaataattttggtattcatacaaatattgatttttgaggttgaaaaaatgaggattttgcttgatattttgatacgagaaagttccttaatgtagtggggaaaactcctctttataatttgttgctgtggtaccattggagtaactcctgatgggtaaatgcaacaagtttgactcgctgaatacattgtgccaaggatttctgtccttccttggtcgtggggaatgatattgacgcaatatcattcttgtaagctaaaggcagctcgtgttttaatgcaacttcttttgcgttttctccgaagatttcattgaggttgtcatctttgtcttgtaaaaccaatgtgctgccatctttaatgtcctgacttaggttattataaaaacagacctttgctgtaaaaagttcatccatttgttcgaaattggcaggatcgtttgatgatactatgtggtctgctgcagtggcttctacatggaattttgcgattcggcctttagtcaaagtttccaatgaaagcaattcgccaatgcgagtgttgatattggattccagaaccacttctttcgtgatttccatggaatcattgtttttaaaagtgagaacatagcctttattgacacgttctacaatgaagaagaggggaaaaattttcttgttcataattactttagtttattatcttttctcagttagaagttgaaggcttaaatcgtagttcttggcaatgctgcaatagtcaaatgccagtactcgttcctgatcatagactaattcactttcgccactatctttgtatctttttgtagggttcccattttcgtccaatatatagaattttaagggtgatttggttttgcctaagtaatccggtgtagatatgaggtaggataggagactttcgtctggaatcattatctttccctctctcttggcttggatattggctttggccaaacaaatcttttcccggacaaataaaatgtaggttggttcattaaactcataggttttttggggatcacttttaatgcttaccttcaaactgcttatctgtgaaatcttatagtcttgtccttcacgaatttcacccaattgacgagcctttgaaaacatagaccagaatactgcaatttcgtcagtgctgctgcaaagagaatgctgatagagaagtccatcaatgcaaatgtcatgaacttgttgttctgtaaatggcaagccgggggcaaaagatttcagacaataatatgaggcaagcatcatagcccaattattgatgaatctttctccgattacattgtaatctacttcacttttaatttctctcagtgatcttttccaagcgtcataccaccctgcattgaaattttcccgatagcgcattaatccaacagttatgtttgtaggacacatatttctgagcttcaagaacttttgatacttgtctgtttcctcctttgatctttcactcttttgtgattccaagaaaatcacacgcgaaaataatgcaatatcagcagttggcatttcttgtcctgtaatgaggacaccgcagttaatcttagttgcttcacgatgttcaccgtcagaagaacgctttgaacgaccggcattgtcatatacacctttgagaaagtctatgtgtttgttgctcagcgaatttttgtattcatcgaagtgaactaacatattgctgacttcagcacatttctcacccattgcgtaatatgttgtactttcaaggttgctgacctctggattgttttggaacaaagccatcaagaaaagagcaaactcagtctttccggttcctttttttccgtagatgttcagaatagggaaagagcgtgtgctatcagtaatgatgtcccggaagagggttgcaatgtagaaacaaaatgcaacgattccgttatcaccatacagctcatgaagcatattgaaatataactccggagctatatccattttggggtcatggataaatcttcgttcattgacaaatgcggttttatttgtcttgtggaactttgacatggccggaaggtagaaattctcgttttcaagccggattatgccatattcatctatgggtttccattttccctcataaataattccattgcaaaacgcataaaatcctttttcgcctaaattattccaacccatctgtactacacgctgtgcttcctcggtcttctcatagatataggctttaaacaattcatatttgtcctgacgttcaaagaagagaaagtttccttttccctcaattttttctttgaatctatctaacttggttacatctgcttgctgcaattctatggttttttttactctgttttcattttccaattcaaagattctggtaggtttcttatcatcagcaattaaaaacaaggggcgaataatgaaattagtccaatctcgctcacggccttgtgcatcaatatcatagtagtggtagccttttctgaagaaatgaaaccctttcaactcatcatcctttttcaaggcttgctgacggcgaagttcctgtcttttgcgagctgcatcagctaaggctgctttccatacagaagctttcttgtacttatccttcaattccgttaggattgatgtttgttgaacatcggaggtgacaagaactaacagactacatacgtcattgattatgcttattttgtcttcattggaagggtttgtttcaaagtgcttttgtgcataccaaaggatgaagtctttttcttccaatgtttcccattttgaaaggtcagtcagataggaatctggatcctgtttgtgttcagcggttggcaattcacgaacagaaacattgaagcccatttccaaagcagttttcccatttttgaaaacgaactgatctccgacaccaaatttagaaccgtctttgggtacgtcattgtctggaataaagcaaatgctgcatccaaatttactaaattcattaagctgagtttctgaccaagtacctcctaatgtcgctattgcatttcctatcccaatggattgcaaacgcattacatccggtgcgccttctacgagataaacttttccggcttgacgtgcagcctttaaagctacgtctataccaaaaatagtttggtttttcttgtaaatcaggcaatctttaccatttagatatttgatataggattgagaatcaatacttcttgctgtgaaggttaggattctgccatatctgtctctttgaggaatcatcaaacgcccacggtaaaaatcgtaatatttacctggttgtttttcatcttcggcaataagaccaagttgcaggagaatgtctgtttttaatccctttgatatggcaaacgaaaggaattgatttccttttagcggactatatcctaaacctatagtttggcagtatgcttcatcccagcgaccacctttgtctcgttcagcatattgtcggcaagctaaggcttcagaagtgtttgcttgatattgtccgcgaaaaaactcatacgcatactcgttgtacgcataaaaggtttctttttgtttttgtaacgcaatatcttcagaaatatttttttcatatattgagggaatgtcaacatcaggacagtacattttcagcagaaagcagatagctccattgaagtcaagcccattgctctcttccacaagtgaaattatgtcaccactctttccgcaaccaaagcacttgtatctgttgattgtgctgtcaagtagcagggaaggtgttttttcactatgaaaaaagcagcaacacttcttgcggtgggggccggcagttctgagagttgtctcaggatgcaagtctacagccaattggcatatatccactcgggattttaccaagtctatgtatttgtccttaatcattattgatagttttggttgttgatagaaatggttatttccacttaccgccctcaatgattaaagaaagagccgtagctatggcaggtgggatgattttttcttcattgaaccatttgaggaacttttgctgccaagaatgaggagaacccccaagttccaaactgatatgagcagtaaatctgcctttttctccgttaggaaggtttttgtaatagaaggcaatctcttttgtggtcatgtctttaaaggtttaaatggttatatattgtatttatccaaaatatggattatttttgtatgcaaatatagctcaatttattgtacatattgtgattttgctcaataaattgagggatttagtattaattagcgcattattaacgtaatttttatgcttaacacggaactaatagaaaatctctatgctggactatctaaagaacagcagcaggagttactcactcttttatttaagaggagtaagcagactttgagctatttcaagcggacgaaagatattacgctttcaaaacttgaagtattggcagacttctttcatatgcccttggattacttccgagttggaaatacattcaaggggaataatgtgtccgggaacaataaccaagtcgggaatgtttctgtcaatacgaaccttatgcttgaaaacgaagcattgagaagagaaatcaaagctcttgaagacatagtaaaggccaagaatgatgccttagcaaccaaagatttgctgattcagactttgatgggcaagaaagaggaataggagttataaaaaggtgttaagaatcaattactatagatttataatatatagtatagataccttcgctacattccgctacactccgctacaacttcgctacatctatatatacccatgatgatacaaaaagtgctgataatcagttccgctacatccgctacataataaattccgtaaaaggtgtatgttggaaaaatatttttttattgcattgtttggctgatttgaagggagtatatagatactattattaaataatcttaattgaataaccaaaatccgttggttttcagaggttatagaagttttgtcgagcgacatatctgcgacaaaaatgagcaaaaatgcgtttttatagcgaattaacttattggaatacagcttgttgcaaaaagtgtaaaaacgcttttgtttccctgtctctccgctggaaagaattgcaaaacaaagaaaatccctgtaaattaatactttacggggattttttgtttttggtacatagcaaaaataagcatatcaaagcattctttcggtgtactattcggtgtacctgattgccttcaatgccaggtacacctattaagtaaataattcattgtttatcagtgctttgcatcttgacttgttgctcttggaaatttagttttgtgattaaaaaacaagtaagatggaaagaacaacattttgtctattgttctacattcgtaggacgaaattgaatcggaacggtgaggctccgataatgatgagaattacagtgaatggagtccgggttgatgcttcagtgaagaaaacaattcttccggagttctggagtgcggcaaaaggaaaggccctggaaaagaagcgtgagtacaaggaactgaatctgtatcttgactctatccgtttgaggataatgaagattcaacgtgaactggaaatagaggaggtatccgtttctgccaacagtgttctggatcgtttccagggtaaggatgcccccgtacaacgtactctgtttgaggttttccgtgagcataatgataaatgtgtccaattgtccggtacggacatggcgcctgcaaccgtgcagcgttatgagacatccttgaagcatacccgggattttgtctgggagacatatcataagaaagatgttcttttggatgaagtttcccgccagtttattgaggattacgagttttggcttaagacagagaaaaagtgttgtcataacacagccaccaaatatttgaagaattttaagaagattatccgtattgctttggctaagggatggatgaagaacgatccgtttttagaaattagattctcattggataaggtggaaccggactttttggaagattcagaaatccagaagctgatatcgaaggaaattgatattccacggttaagtcaggtacgggatatttttgtgttctgttgtttcaccggtttggctttctcggatattcatggtttgagaaaggaacatatcgtggaggactcgaacggtgtcaggtggatacgaaaggggagacagaagaccaaaatcatgtgtaatattccattaatggaaataccattgaagattttggaaaagtattccaccaatgaatattgtaagaaacatggtgtgctttttccggtgctttgtaatcaaaaaatgaatgcatacctcaaggaactggctgatatttgtggtattaaaaaaacattgaccacccacgaagcaagacataataaaaattatatctatctaaatatgaagtgattaagactgaagcgaaatagacttgttaacggtttagaaaccagcgaacttctatattcttcctcattttgcattaaacgaaagaactttcttacttttgcaaaggtacaaaactttacccgttttcacgaatttcctaaaactttttttcattcacgatggaaaagccacgcgactttgacccttttggccaaacaggatttgcccacctttggctacaatatgattgcccctttaaagtcctggtgttgggggtcaattttattttacccttttaaaatttcccgtttttcttagcccgtaactttcgcatactttcaccatataactctatggtatgagccgtatgtatgatgcggtcaaggattgcatcggctattgtcgggtcacctaccatgtcgtaccagttggaggaggggtactgcgatgtgatgatgatggatttccgttcatgcctgtcctcgatgatgtcaagcagtatgggacgctccttggcgtcgaggggcacgatgaacaggtcgtcaaggatgagcaaccggcatcgctcaatcttcttgagttccgtctcaagtgtacctttgactttggcgactttcagcgctccgagcagtttcggggcattggcatagaaggtacggaatccccttttgcatgcttcgtggccgagggcgcaggccagatagcttttccccgttcctgaagaaccggtaatgaaaaggttctgtgccttatgcacaaaatcaagggtggcgagacgttccatctggttgcgatccagcccccggttcgtggcatagtcgatctgttcaatataggccttgtaacggaatgccgcattcttggtaagccgtgcaatggcagcctgcgcacgatagtcccattcgcgtgcaaggagcatggaaaggaacgtgtccgcagtcatggattgcggagtggtgccggcaagactttccctgaaagcctctgccatgccatgcaatttcatacggttcattaaatccagcgatatggtattctggtcctgttgtcccgtaacgggagctgttttattgtttacttccatacatatgagttttattgtttgtcctttctgtaatattcacgtccacgtatgtttttgtgggtcaatggagccggggaagtcatgtcgggctgtactttcccgtcctcatcgggaaggaaatccgcgtcttctcccagttcaagtacctcgcgcaaggcctgatacccgtattgcaacttctggtccgcacatgcgcaagccgccaccagacggtcgcgaccgtattttttctccaacgtcaagataccccggcatgacctgaacgcttttggcggatattgcatggcacgctccacttcccgtagatagttcaatacgatattgtctatttccgaggcgcgtcggaagagttcctccaggtccttgtcataggggccatagtgtcccggcaggttgtgctcctttttccaggaataagcgtagggaatgtcacagcggtcatgggtggcgacaaggttcatgccacagtagatttccaccgtgccggcatcatagagaatcgtcatgcgcctgcctacatactccttcggaacgctgtaatggtgcttgaacaacgagacgtaagagttcttcccgacagtcatcagcttcctctctttcattacgtaacgtttcacgggaagcggccgaagataatccttctctccctgaaggaacatttccttgcgtgacacctcccgtccggccatcaccttttcattgaaatcaagcagggagacatggatggcggtattgagttcctccaggccggaaaatgtcattccctctatgtcaaggtaaatggaacggtagaggagctttacggcattctctaccaaagccttgtctttgggatgacgcacacgggcgggatagaccgcacagccgtaatattcggcaaaagcggcgaaatcatcattgatgacaggctcgttgcggtcgcttcgtgtgacggcagccttcagattgtcggggacgatagccgcaggaacgccttcaaaatattgcatggcattctcacatgcctttatcaggtcttccttgcgttgagaccacacggcttcgcagtaggtataatggctgaacggaaggatggcgacaaacacctcggctttcttcgtctcgcccgtcatttcatcaacgacttcaagcctgtcaccggcaaagtcaatatacatctggtcggcggcatagtgctcgacatgaccgacgaccttgacgtgaaacttgtactgacggacagcccgtttgaaggaagacaactgatagccgtcaggatattcggcatggtattccttgaacagttttcggacactcatgcctttgcgtgacaggcgggatacatagccgggaagcagggcctccagttcaatcctcctggaagaaggctcccgatgccgggatgccgtacgaacagttcatccaattgcccgtcggacagggaaagaagctgttcaatactcttgccgcttgaaaggaacaggcggacatacttgcggacagtattacgggaagtatgaaacgtggacgccgtttccttgattcccatgccggccgcataacatcttaaaatgtttttgattcgtttatccatttgtatagattttattatcacccccgttacaccaggactcgggcactcaaatctacacaaaaaaatctataacaataggtgagctaagtggtcaatactattttggccaaaagggtcaatcatattgtagccaaaggggacaatcctgtttggccaaaagggtcaaagtcgcgtggcttttccaacaatatcaccgaataataagcaataaggaaaaggcatatacatgtaaacccttttagtgaggtaatactatgttccctctcctaaatagaaaaaataattatttaaatttacacagtcagattgtaacttttgcaaaaaaaaactatttttgcaaatagtttatcttaaaaataaatgaaatgtcgacacatggtagtctttcggaagtggaactatttaatcttttgtataaaagttcgttcaataaggtttgcaactttgcctgcttttatgtgcgaaataagcaagtttctgaagacattactatggatgccttcctgcaattgctcgaaaccatgaaggtggaatcggttgataatcccatggctctccttatcaccatcgtgaaacataaatcgctggattatctcaagacacaagtacgacgagaaaataccaaagatgatcttatacaatggaaacagcgtgaactggctatccgaatctcaaacttggaaggctgtaaccccagctatattttctcacaggaaatcaaatctatcgtaatgaaaactcttaaccaattaccgaaacaaactcaaaaggtattcatcatgagccgctttgaaaataaatcgggaaaggaaattgcccaaatactaggtatttcggtcaaaggtgtagattatcacatgaacaaggcccttaaagaacttcgtattgctctcaaagactaccttcctgtcttaatctggctctgtttgacggaacttatcaatgaaggataaatttgttaatataggttaatttttctaggccagcactatagatccccttctttcagtcgccattattacaaacaataaaaaaatatggacgacgaattattaatagcttatttcaaaggagaggtttcggatgaagaagctcagcaaattaccgaatggatagaagcgaagatagaacaccaacgttactaccaacagctttgtcgtctgtttgaagtgagttactggattgaggacatacccgaacagacagaggttgccttccccaaaaaaactaaagccctcccgtggaaacattatgtcatatctttcatgaaagtagcagctatctttgtgctgggttttgctttgcacttctttttgaactggcagaaaacaacccaccacgaattacaacaccaaattcatgtaccaaccggccagcatgtagaaataatgctggccgacggatccaaggtatggctgaactccggcagcactctgaccttcccctcgaaatttaacggaaaaaaacgcatggtagaacttgacggtgaaggattctttgaagtaaaatcagacaaggaacatccctttatcgtttctacttctaaatatcaagtaaaagcagtaggtacttcctttaacatatatgactatcaggattctcctcaatttgaagcggctctattgaacggtaaagtggaagtcactaccaatgcaaaaaaatcatcggttgtaattcttacccccaaccagcgtgcagcgctatgccaaggagtattaaaggtaaaaccgattgaaaatgctaataattatctgtggcgcaaaggaatactctatttcaacgaacctctattggaagtgtttgacaaactgcaagaatactatgatattgaattccaaatcagaaattcttctttaacaagaaaatcaccctactgtaccggtaagttccgtgccaaagatggactggaacacatcatacgagtactgaaagaaaccaatcactttgactatcaaattgattacgaaagtaaaaaaattatcatcttataaattgtgtaacttataaattataaaatgcctatgtaaaacgacctattgtagcgtaacgtagggcagttctggaaataatactgcccgtggcttgaagccatctgatcttaaattaaatactaatgattaaattaaagtaaattatggattttaattcctacaaaaaagttatttcaaactgtaaccatatcgttaaggttggtatggtttcggcttatgctctttttttaggcgcaaacactgccctagcgagtgtaaccgagtacatggatcaaaaagtatcccttaagacacagaattgtaccattgaatctgtgattcaacaaattgaaaaacaaacagattatttgtttgtatatgacaaaaacgatgtggacgtaaaacgcaccgtatatgtaaatgggagcaataccgatgtaatagaactgttgaaaggtatctttgccaacactgatattgactgcaaggtattaggtaacaatataactctctctaaaatttctaacgtagcgactagaattgctcaacaaacaagacaagaaaagaaaacagctaaaggtaatgttatcgattcgaccggtgaaccagtaatcggtgcttcagtagtagagcaaggtactaccaacggtacagtgaccgacatcaacggtaactttacactgaatttgagcactccaaatgccaaaatagaaatttctttcatcggctacaaaactcaggtactggctgcccaatctggcaagctgatggctgtgaagctggtggacgatactgaattactggacgaagttgttgtagtaggttacggttcgcagaagaaagtgaacatgaccggtgctgttgctactattgattctaaaacattggcttctaggccgatttccaatatatctcagggcttgcaaggtttagcaccgggtgtaactgtaactaatgctggtggtcagccaggtcaggataccggtaaaattttaatccgtggtttgggttcattcaatgcttcttctccaatggttttgattgatggtgtagaaggtgatatgaacgtggttgacccgaatgatatcgaaagcatctctgtattgaaggatgcttcttcagctgccatttacggttctaaagctgctaatggtgtaatcttgattactactaagcgcggacagagcggtaagcccaatttgacttacagtgctttgttcggatggtcaaaacctgccgatttgatggaccgtaccacctctgctgaattagcagaattgactaatgaagctgaatactgggatgctatctctcaaggcgcttctcctgaacaagctgaaaagagaaaaccctacactcaggaagacatccgcaaatatgctgagggttctgatccatacggtcaccccaatactgactggtacgacttgttttataccggctctggtttcatgaaccgccataacataggtatgagcggtggttctgaatgggcgaagtatagagcgtctttgggttatgtaaaacaagaaggtatcgttgaaaacgcttctaacagacagttcaatgttcgtaccaacttagatctgaagttaactgaacgcttgaaatcaagaatcaacctggactttgccaatacattgatgaaagaaccgactgacccgatttcttggtcaaatggtgatgcttatcaagtattcagacaagtaaatcgcatctctccgatggttccttataaaaatgaagatggtacttatggtgccattgctgatggtaaccccattgcattccaagacttgggctctactggtgatacagacaaagactacttgaatgctttcgctgaattttcatacgatatatgggatggtttgaaaattaccgccaacggttcttacaacatagtgaataggagttacaagctatatagaaaagatttgcaatataatgcaaacaaatacgatggtccaatccgcctgactaagagccacactaaggaaatccgcagacaaggtgatatcttgttgaactacgacaagacctttgcccaaaagcacaccgtaaacgctttggctggtttccacacagaactctattcttatgaatatgatgatgcttacagacaagattttccatcatcagacgtaactgatatgaatggtggttcagtagtaggtatgagaaattctggttatactcgtgaactagcaatgaattctgtattcagtcgcttaaaatacaactatagggacaaatatttgttcgaagctaacgtgagaggtgacggttcttcccgttttgcagaaggcaaccgttgggggtggttcccttcattctcaggtgcttggcgcataactaacgaagactttgtattaggtactgctttcaatgaagtagtaaccgacatgaaagtaagaggttcttggggaatgctcggtaaccaacaaataggtaacgactactatccgtacatcaatacatatgccaccaatgcgaaatatccattcgataacaaggtaagcggtggcgctgtacaaactgaaaataaaatccaggatatttcttgggaaaagactactacttggggtgcagctgtagacatgactttattcaacgaactgcaggttactttggaatactacaacagaaagacaactggtatcttgatgcaggtaaatgtaccaaatacttatgggtatcctggttactgggacaatgtgggcgctatgagaaaccaaggacttgaggtttctttggcttggcataaaacattgggtgaagttcaactgaactttgctggtaactttacttacaacaaaaatgaaattttgtcactgggtaatgtagacgttcagaaagacagccgtactattcgcatggtaggtaaggaatttaatgctttctatggttacaaatcagacggtatctttcaaaacaaggaagaaatagcaaatgctccgaaatacacaatgatcagcaacgaccgtttaattcctggtgatatcaaattggttgacataaacgaagatggtgaaattaaccctgatgataaggtaatcctgagttcagaaaacccgaaatatactttcgcattcaatttgggtgctaggtggaaaatgtttgatctcaacttgttctttcaaggtgccgctggcgtatcacgctacttcactgatgaattctatggtgaatttaacggtgactctggtcacccttcaaatcactggttaggccgctggaccccagaaaaaccaaccaacaaatggcctagagcttctaaattcagaacatataacttaccggaaactacttgctcagacttctggttggtaaataccaactacttgcgtctgaaagatattcaagttggtttcaatgttcctaaagaatggctgcaagctgtacatctaggatctgctagaatttactatagcggtactaacctactgacattcagtaagactcctcagggtatcgaccctgaagctccggctgggtggggtgcatattatccgcatgtgaagactcactctattggtattaatattacattataatttagcaattatgaaaaatatatatttgtcacttatttcaggtttcttatttacagcttgttcactggatagagtgccgtacgatgccttatctaccgctactttcccaaaaacagaagcagatgtagaaatgttagctgttggttgttatgatggctatgccaaccaagattatactatatacaatgacgtgttcagtgataacggctattgtgccatcaatactaactgggctgtttttgccaatggtacagctactcatgctgttccaggcatcaactggtatgactacaccctgattacccgttgtaacaacttcttgcatcaggttactaccaaagaaattcatttcaatgatccccaacgtttggaagtcttgaaaaacgaagttcgctttctacgtgcttggcgttactacatgatggtaactgcatatggtgacatccctttgataacagaagtggttccttctttggaagatgccaaactgccagctactccagaagctgatgtagtgaaattcatccttgatgaactgaatgatatcactaaagacggagcactggatgtaaatccgaaacagaaaggaagaattacacgcggtgctgctttggccttgaaggtaagattgtgcctgttctacaagaaatatgatgaagtgattgacgctgccaatgaaatcaagagcttgggtgtgtatgatctgtaccaagaaggtgaagttccttactctgaattgttcaaagaagccaatgaagacaactgcgaaatcattttggctgtaaagaaagtaatgaacgactacaaaaaccaaaccataattgaattttgtaacgtgatcgacggtggttggtcggcattcgtacccattcaatctctaattgatgcatatgaaatgaaagatggtctgacaatcgaagaagctcaggctaaaggtaagtataatccagaacatccttacaaagatagagatccccgtttctatgctacaatcctttactcgggtgctgattggatggataacaagggtagaaagagaatctataatacgctggacagaaacattaacggtgaacctaacaaagatcatcgtcttgattctagaaatgcttctcaaactagctattctgtctgtaaatacatgaaaccactgactcaatattcagatataaacaatactggtctggatatgattgtgttccgttatgctgaaatcttactctcaaaggctgaagctatgattgaaaaaaatacagacctttcagatgctactgacttgattgacctaatcagagaaagagctggcatgccaaaagtagacagagcaaaatataatacacaagctaaactgagagaattgctcagaagagaacgccgcgtagaatttgctttcgaaggcttaagaagagatgatatcatccgttgggacattgccaaagacgtactgaatggtccaatctatgcttctaaccaaggtaccgtagatatggacccaagcattccacaagaagagcgtgctacaattttccaaggtgaaaagaaccaggtggtactcgaaatccgtaaattcaggaaccgttacatgccgattccacaagctgaattggataagaacccgaacttgaaacaaactaactttaaaatataatcttattaagtagttctaatatttgttgggtccctatgttatgatggatgcttggtgtcatcatcgaggatagggacttactttttaattgtataccatgagaaaaagattaattttaattgcagccttacctctcagcataagcttgaaaccacttgccgctcagaatgaaaagatttttatcatcgataaacagacagtctatcaagaaatagacaatttcagcgcctcagacgcttggcgctgcgctttcattggtaaaaactggcctcaagaaaaaaaagaaaaaattgccgacttactattcaaacgtgaatttgacaaaaaaggcaaccccatcgggatggctttgactaactggcgcgtaaacatcggagccggaagctatgaaaaccgtgaagcaaaggaggtggataactcttggaaccgtaccgaatgtttcctctcacccgatggtaagtatgactttaccaagcaggcaggacaacaatggttcatgaaagcggcccgtgaacgaggcatgaataacttcctgtttttcacgaactcagctccctactttatgactcgtagcgcttctactgtttctgctgaccaggattgcatcaatctgcaaaatgataaattcgatgactttgcccgtttcttggtgaagagcgcccaacatttccgtgaacaaggctttcatgtaaattacatcagcccgaacaatgagccaaacggacaatggcataccaattccttccaagaaggcagctttgccactaaagctgacctctaccgcatggtagaagaattggataaagcaatcagcgaagctcaaatcgacacaaaaattctaattccagaagtaggtgacatgaaatatctatttgaaattgattcgataactaaaactccagatgatatcatccactctatgttctacaaagacggacaatacagcgtgctgaagttcaaaaatctttttaactgtgtagcagcacacgactattggtcagcctatcccgctactttgttggtggatatacgtaatcgaattcacaaagaactctcagccaacagtcacaataccaaattttgggcatcagaatactgcattctggaaaagaatgaagaaattactatgccagcctctccgaaacgaagcattaacctaggcttgtatgtagcccgcatcattcataatgatctaactttggccaatgcttcggcttggcaatggtggactgctgtatcactaggcgaggatgtgcccattcagctattgccgcttgaaggttcaaacgggttgtcgttacaatatgacggtgaaatctctaccaccaaaatgctgtggactactgccaactacagtttctttgtgcgtccgggcatgaaacgcatctccgtaaaaccgacctataaggtaagtgacttggaagccgctacttcactgatgatttcatcgtatactgatgggaaagaagtggtgaccgtagcaattaattatttagaggagaatcaggtaattaccctaaactgtgaccatgcccaaaaaggaaaagtttatttgactacaatcgacaagaatctgcaatacatgggtgagcaaccgctgaaaaagctgcagttgccagcacgttcggtagctaccattgtggtggaagacaactaattagggatatttgttaaatattacaattagccaactaatttatacacaatgtattgcgaattagttggctaattttacaggatttactgaatgtccctaattgtagatactaattgaaaagtgcgctgtattctaattgaaaagagctccatccataacttgttacaaaattactataagtttaaaatattcatttatcttgtctcattttttgtgtttccttaagcctataagacagtccggtcatattaaccagataagctttatgtgtaagcctgtcaaccattgccgccacaagcaccttgtcctttatgatttcattccatctgttaaaagccaaattagtagtaatgattgtagccttttttccggctcttaacgacaggtggttaaaaagcagttctcctccttccttgtcacaactgacatatccgaactcatcacagatgaccagatcgtatttttcaaaccttaattgtagcgtcctcagtgtctttgctgatttagcctcccttatctgggtaagcaggaccggcactgaagtaaacaatacggtaaagtcctgttggcaggcctttattcctaaagccgtagcaatatgcgtctttcccgttcccggatttccatacaggaccaggtttcttccctgtctgatgaagtccagtgtctccaattcaggtaatattacctgtgcctctttgggcatgtcttccataacaagctcatgcagatacttcatttgtggaaatcccgcagatcttatccttgatcttcttctacactcccttctcctggcgctttcctttccaagcaattccgtcaagaactgcagatggttccagttttcttcagctgccaatgaaagggtgcattccagttcctctttaaaggccagaagcttcagttctgcagcatagtcataaatggtttctttttctgatttcatatattataaacttaaatggttggtattatatcatgcacttcattgtatcctgtcatgagcgccgtgatgccttcaagcatatccacagcttctctttctatattctcctgttgtgccgggagaacaggcggttccatggtttcttctgtctctccctgtacgctaccatgcagcatggcctttacctggtccggagatatctttctgacaccacgtccggtcagctccttgcatgccgtgacaatgtccgttccggaaaatccattttttcgggcatagtccagcaacagaacaaacgtcctgttgtcctccttgaaatggatgtcatacagccttctcagttcttccggtgctctttgccaaaccacagagtggggcaatgcccccggtttacgggaaagtgtacgcaaatagtgctccagcttgatgcaccagtctccaccgcaataactgcgttgatgagaggccactttctccttcccgtacaggatgacgattttttcactataaaccttgacatgtactttttctcccacaagagaatcaggtacggaataatgaacatttttcatgctgatagttgaccatttatccacaatgtactcatagacctcaaaacagcccagattaccgggaaaaggcttcagcgatgacaggtcagcttccagacgtgatgttttctccgctgttgaaagactgccttgctcgttgttgacctgcatacatacccggtttaaatgctcctgggcagaatgtatatcaccaaaatggtctgtcaggcagaaagctttccttctgacatattccacgctgcgctccacatgtcctttctcccatccggcccgtacattacagaaacggtactcaaaacaatagaaaccggacatcttcatcaaagcttctgtaggtttcttatcaccaccgacaaagctcttgacggctacacgcatattgtcatagaccatcatggcggggacaccatgtatatccctgaaaaagttacggtgggattccatgaaggcaagcgtattctgatgcctgaaaagataggcgtatctgccattgctatgcccgaaagtgaatacggccagataaaacttggttttgacgccgtcaataaaaagaagaacttcaccccagtcaaactcggcaatgcatccaggctcatagaacaaccggataaaggcttcgctctttttcttctctttgtatgactctatattttttatataactgcatactgtggcgtaactgatggtgtatccttgagataacagaaactggtggatatcctttttcaacatgcgctgtttgcgaagtccggtagctatcttaacggcattcttcttcaggcaaaatcctatcttatccttaatctcttgtgtgagccggcgaggacggcgtctggaactgtcatacctgggctggatggtaagcaaatcactcaaagcctcttctggattgtccgtgcggatggctgattcgtactttgaaagaatattgtcaacggtatgacggctgacatgaagttcacgagagatacgccgtttgctataaccgcatactctatacatgtgtattattgattgtctttctaccatagtcttcattttacctttgcatttggattatacaaaggtcattatacttatcctatggtggcgcaattttcaactggaatattggcgcacttttcaattagtatctacagctcttgtgatttcccttcgtatttatcatttccgcatggtctgttagaaatgaaacgaggatattcttcttgtcctgtcatattctatattcaaaaggttaatgcacaaagttaataaaaaaaatattatagataaaataatatagtcgtaactatgaggtgtctgttcttgcagaaccccaaaaatgatttagattctaaaaaacaaccgccatacttcatgtccaaagtgatggcggttattttatccgattgtttataattgaattatgctatcattctctgaaagtaattataaaaccaatggtactcgatcaataatttccaatataagtcaatccttagattctttctttcagaaatgtcaatatcaatatcatcaatgatgttaattctaatatcattatcagtcaaagccttatttacctgatttaaactaatattatttataacaatctttgcccatatcttcctcatgaaaatcaaggttgaatgcattaaatttagagagctgatggttgactcgtatttttcaaaataagttaatgtaccatcaatttcatatcgtacaatctctgctgctctcggaatgaaaaatagtggaacaattttatcatttcccctaaagttattgcagcatttatgtagtatatatttttctccaccttcaaagacctttccttgacaagaagcaactaaattttcatgtgcaatgcaatggggatagggaggagtatgtagtttgggagatatgggaatctctttatctgggcaataatatattttccccctttttaatcgtccaaacttactgtaatattttacctcttccttacgctttttgtcctctaaatgatgtggcattacatgttctaaagtcacctcattaaaaggaatttttctcatgcaataacaacaaaatccttgttgttctttgagcagtaaatacttaaacgctttaattcttttaagttcgttgtagtttaaatttacatctctttgaatatcattgttccacttatctttaatgaaagccttgataattcggtgtcctttcctcttatatttgaatttattgataaattgcatattctttattagtatttgtcctctgccagttgagagtttattttagagataatatttatgtattgttcctccgaaaccatagatttaagttcttctttccttttttctactaattccggcttacctcttcttgaaagccttaagatggcttctatttcttctttaacctcattgtctgcataaggagttcccataaaatcataaacagcagcagaataatccacgccatataaattaggcaatgcatttggtgtatcttcgtctgcctgcattctataaatcatatttcccgtatctttgactttaagattggagagtaccattggagaatgtgtagatacaataaattgaatacttggaaatgtttttttcagacgagctaacacttcttgttccaaagaaggatgtaaatggaggtctatttcatcaattatggcaataccttttgggtcttcctcgtttgttttccgtaaaatatataatctataagccaaatcaaaagcaatggagtatagtcttttatatccagcaggtaaattatcaaagataacgtcccgttcattttttaatcgcagatataatgatagcgtcttatcatctacaaccggaaagaaatcttttatttcaaaatcatccttttcttctaacgcagaattgataggttcagaaaaagtgcgcaatttattttttatatattctacttccttagaatttaacgggtcactatcattaagggaaatttgttttagcatggaattaatgaatctattttgccagatagatgtacatgatacttctgaattccatttgtaataagcaaaattcctgataatatatccttgttccttaatagctttttttgcaaaatcgctggttcttgtatctatatgtggaaatgaatcagaatagaaaacaaacagtggaagttggtcgctattatgatattctgccataagtgtacgatatgcttgttgatacttggaaacgaataacgaagcacctgatgtagaacgcttatagtattcccaattcaaaggtatatcattaaattcagcttccatgttgattgttaaatcaactgctggtaaatccgcattttgggctcgataaaaatctgtagctaatgttgaaatgacttttaaatcgggattacctgatataagtaaatcatctcccattgtgctatcattggaaaaaaagacacttaatccataacgaatggcatttagtagagaagtttttcctgcgccatttttaccaataaaaacagtaattcctggtgttaaatcaacctcatagtttttaaagcaacggaaattttcaattgttatttttttaagtatcatattattttctttttttctgtctatggatataatattcacaaagttagtgattttctaatataaaacttcataatctgattattgtttgcaaatttagactctaaattccttttctccaaaacattgtaactactatatacacaagtttacatgtgaatcttatcctttcatcactatagtacgggatatgcacataacgtcagggtatcggcagaattttctatatggaaattataactctctaagcatcttctgtgagtttaccttcatccaccggcttatcttcttccataggttcatccttatcatcggacaacatgccaccctctatacgttcatctccgttacattccttcgttttgcctttttctacattctccccgtcaaaataccgacgaataaactcgtgcaaatccttttcacgatagtacgttttatgcaagatcgtgtaatacttcagcccgttgtctctgtaccgttgtagtgttcgtttgctgatgttcagcaacagacaaacatcctgattatcgtacagccgttcaccattcaggtaattttgcggcttcttattcttcttgtccagtgcgcctacgaccttttccacttgttcgagcaaccgttccatatacgcctcgaatgtttctttatccaatggtatcataagctcgcctgttttaaatttccgatgatataataactttggtttgacgggtctttcagtatgatttccttctcccgcatgaacttgatataacttttcgctgtacgttcctttacgtccagtatcgcttgaatttgttctgccaaatccacataagtaataaagtcctgccgtccgaaaatatcccgtgccactgccacgagttcatcctctttccgcttctccttttcctctttcggcttttcccccagatacacgtgcatcctgacatctttatcccatgcaaactgcatgataggcacatccaacggactgccgtcgcgcactttcagcgccttcaccaccgacaccgacggatcagtatctttctctatcgagaggatagccgccgcctttcgttgcaactcactgcccaaatgcccccgcaatttcagccccgaaggaataaaatgcaggatagtaacgatacaagtattgtaaatccccgccagccgatacaattcctccaccacggcaatactttccgtttcatcattcgcaccctttatcaagtccgcaatcccgtcgatcaccaccatgtgaatcccccggaactgataatgaaacttatccatgctttggataatcgcctgcaagcgttctttccggctcattcccgtcaggcaatacgctttcaggtattccggcattgattcccgtccgcaacgctttaaaaggtttgtaatgttcttgtacgtctgcacctccgactgttccgtatcatagaacagaatcgccttccgcttgctgttttcactgaccgacacccccaacgtgtccatcgccttatccttgttcttttcggattgtccgatggcaccggctattaacgccgtcacataattacttttaccggttccctcaccaccggtaatacagaggatattcccttgcgtgcctaatggcacatcattcaccgacacaaccatttgtgccacaggtggcggattattaaaatccacctcacaagattttagagcagacatagtttcgctgtatattgtatccagataatccagaaatagtttaatcaaatcctcccggctatttcccaaacggaaaaagtccgaaatatccttttccaccttcgttcccgccaatggcagcaacaatcgtttcaccccgtagttcttcaacgccagttcttgttttgccgaactgtccagccccgctttgtccacatcatagagcagtacaatatgtttgaaccggaaagagagcctatgaataattcccacgggaatagtcaccgtttccgaattgaagcagatagcatggaacccgtgaaccgtcaggctcatcacgtccttctcactacccgtaataaagagtaaatcccccttagcaggcaactgctccaacccgaagcaataattctccccaaaatccccggcatataaaaagcgcatctccgagtgcgggcggtacaccttcacatattgctttgcagtatatccgaacaccggttctttatccgtcgccgcaatgctgaacggtttcccttcgttattctcgctgctgaacttcttcagtgaaaccacccggaataatctcagtacctcttgcgtgatgccgctttttccccagaaggcaagttccgcagccgtaaagctcttttgcgccaacgtataaggtcttgcctttttcactttggatggcgatgttgctgccgtgacagcaggactgatgggagtaatagtcttcgtttcaatataatttcccgatgataatcccaaatgcaggtcacgatcgattattttcattatctgaatgaagtctttagaatctttacaatctagtccattcaattttcccacgaatgcgaaacagtcgcctgaatagtcgtcattaccaaagtccttcattttataagtatcacttcttcgctcataatagatgttacaggaagcgtgcttatcctcataaagcggattaaggaaattacgtcctacacgaaatggggtagggaggtagtgcttgaatatagccattcctctatctgtcaatcgcagaatatcatctttattcatagttcccattgaataagaagtttctacggaactcatccagcgtatgtggatcacaaacgattattttctcatttagtcctctttctatttctgataatttgtatctgcatcttcctcgtaacatggaatagctgattagattttcttttcttaatcgttgcagtgtcttggtacttatacgtagcaagttggcaacttcttgattatccaaccatatctcttcctcctcgtttggtttactctcttttttgaatacatagtctgcaatcttttctattttgcggattagttctttataggcagtcgcctccattgttattacgtccatacacttatcttttaaagtttggcacaaagttcatcgaattaaatcggggcatttgccaacttgttaccaacttggcataactttttttacatgacgattggaaatgagtgggatggagtcgggtgcaagataaagtccggtgcaaggtgcaagcctattcatatatataggctcgcaccttgcattggaatataaaaaatagataattaataatcaaacatttggaagatgttcatattttccatacttttgaacccgaaagctatggtagacgaatagcggacaaaagtggtcattaggacaaaagtttaggtcgttacaaattcgttacaggaagcaaaataatgaaagctaataagctgatatatacggaaataaagagaagaggttcagaaccctccctctccgctggaaagaattacaaaacaaagaaaatcccctgtaaattaatactttacgggggatttttgtttttggtgcatagcaaaaataagcatattttttcattagaaagttcggggtatttataccctcatgccctcactgtatgtataatggatttattatgaatgacttatatgataatggtaaaaaaaattgctctcacttatactctcatgccctcactacgttttgaagttgattttcacataatatgcttgctgtcagccatatattcttttttatagacagttcctgcctggtataaagtagggcgttttcaagccttttcctcgtaagaaatgcgcatgaaagaggaaacttccacgaaatgatagcttacggattcgcggcagcggtaaaaaagaacaagacattttaaaaaaagctcttgttcttttaaaaaaaggcggttatcttttttaaaaagctcttgatctttttttaaaacgcccttgtctttgatatggaattttattctggactgaggcattttacatatacatacgcataagttcgtacgtacgtaggtatagccttgtatggatgtatgtgcaaaagcgtgtttatacccgttctctttgtatttctttaaatgcttttcacttattcttattgaatttgtgcattgatttcgtttctgaactttataggattggtgataaagtcaaatttgttggtgaccccgcccgtagtaactacaatagaaccaaaaccgagcatacgtcccatgaggctttgattaatccgtattccttcgcatttgtttaaaaccaattcaagggcatcccggtttaaaataccggattttagaatgactttcttgtttgtgacaacatattcagctcccattttaagaagaattctttttatcaattggaataatcctgacaacaatagaagtatgctgacataatagaataatccggtttgtgcggaagaaaagaaggcgcttaataatagtagtattaccggatatgcaaatatataccagtgaatatctgctttgtatttaatttcttcaccagcttgtagattgttttggatatagctcatcgtttttgtaaattaataaattgcataattttattatcaagagacaaatatacaaataatcagaatggtatgaaataaatctagatttattttaaggctgaaacttaaaataaaaacaattcttacttgttcttattcttgtcaatctctctcttattatcaaatgttttattcttgtacttgctgtttcaagaatttgtaatccttataattttttcctctctttattcggaaagttagtttatgccattcatcttttgttagggggatatccacgttcatgcaaaaatagcaggtttcgtagccaataagaggagaaatccatatttttcctatacattctttcttgccggagttggaataatataaaagacagcgtactcttcttatttgtatgctgtcttcattgcatactttgacctctatacgtttaccttttccgatgttgtagaattggggagcagacatttttattttgtttaaaatactatctttatcatttacactgactacgacgaacttctctatattgtttggcgattgggagaaagtgctttttgtggcaaacaacaatattaaaagtaatgttataatttttttcatgtgattggacttgttggttaaagcagtagcagattattaattaagaatttattcttccgataataaatacttcatactgcaaagtaaatgttttttgttttaagggttataattgttaaaatgcaaaaatagcctgcatccgctaatctgtcaagggctgtttttcataaaaaatgttcaattctttggtatttctttggggttttcttggtatgaaatttctgatagattatatgaaaagtgatttggaggctattgaaattcttttagagtggtgcattaagcgatgggatgttttaaaagtctggttggcattttaatgctttatctttgtaatttgaacaaaaagtaataaataaaagaggtatatggacattcttgtatggagtggtcttggaaactccgattatttggaaaaatgatgtcgttttccaatatatatttgtacttttggctgaaaagaaaaaaaaggtatatcccgtgtttatatcgggtgtgtttatatgtattttaatggactacggttttatgacaaacattatagataatatgctctctttgtgtccggtttctgaagatacgatacaagaactgaaaaaatgtatgattttatgtcgtttccctaagaaatatcagttaataaaggagaatacattttgtaaatcagcttatttcatagaaaaaggaatgacacgttctttctggcttgtaaatggagaagaaataacaacctccttttcatgggaaggaggtattgttttcagtatggacgagttgtactataataagccgagcgaggaatttgtggaaacgcttgaagatgtagttgtttacaaaatatcattagctgatttaaccagactgtttcagactaatattgaattggctaattgggggaggattattcatcaaaatgagtacaggcgtttgcatcgttctcacaaagaacggctgactttgccagcaaaggaaagatatgaggagtttaaacaacagtttcctcagatatgccaacgggtgaagttaaggtatattgcatcttatttgggtataacacttcccacacttagtcgtctccgagctaagaaataatttatgtattgctgattttttgtcataggacaaatttaaaagcctttaagttgtgtaactttgcagcattattagtaacaattaaaaagaatcaattattaaatctattaatttattatggaaaaaatctcttctgcagcatttactgatacaaagcctcattatgatcttcttgatggattgagaggagttgctgctcttatagtaatatggtatcatgtatttgaaggttttgcttttgctagtgccggcaatatcgaaactctcaaccacggatatcttgctgtggatttcttttttattctttcggggtttgttatcggttatgcgtatgatgaccgttgggggaagaatttcactatgaaagactttttcaaacgccgtttgatccgtcttcatccgatggtaattatgggtgctgttttgggagctattacgttctgtattcagggttgtgtgcaatgggatggaacgcatgtcgctatttccatgattatgttgtctttactttgtacaatattctttattcctgccatgccgggtgtgggatatgaagttcgtggtaatggtgagatgtttccgttgaacggaccttgctggtccctgttttttgagtatataggtaatattctttatgcgttgttcattcgtcggttatctaataaagcattggctgtgctggttgtgatgctgggtatggcattagcgtcattcgctgttttcaatgtgtctggttatgggaatatgggagtgggatggacactcgacggagtgaatttcttaggtggaactttgcgtatgcttttcccattttcattgggtatgttgatgtcgcgtaacttcaagcctatgaaggtgaatggggcgttttggatatgtactattatactgattgcgctgttctcggttccttatctggaaggattggagcctatttgcatgaatggtatttatgaagctttttgtgtaattgtggtttttccttttcttgtgtggctgggggcgtcgggtactactacggataagcagtctacaaagatatgcaagttcttgggagatatatcctatccggtttatgtagtacattatccgttgatgtatttgttctacgcatggttgattgagaataaactttatacattgggagaaacttggtatgtagctgtgggtgtttttgttttgagtgtcattttggcttgcctgtgtctgaaactgtatgatgagcctgtaagaaaatggctgactaagaagtttcttgctccccaataaaaatactgtatttcttgattgatgttcattaaaagggcggatactatataagaaaatattacagctttgaataacagacaattagatgaatggcatccgatcagtaaattcggatgcctgcattggattatatcaactgggctttgggggtgatttccttttctggcaatagttacacatgctgatgagagcattccgaacatagacctttcaggacataattgatactttgtacggtgaatccgggaggtagtgtcacgatgggcacgtggatacttttcatacaaaacgtgcggtgacagttctcacagtagaagtgagtgtggaggtcgtctacctcacaattgcaatcattgctgcaaactgcatattttaacgatcctgtaccgtcatcaatgccatgaatcagatgatgggctaaaaaaagggttatggtgcggtagatggttgatttgtctaccgtatccaattcgttttccaaatccaacagtgaaaatgcttctttgtgctgcatcatggtttttagaataagcagacgtatggctgtcggtttgatttcccgctgttccagtttttttaaatagattgtttcattcataggtcaaatcattttattctttccatttctgtattctcattgcattaaaaatggcgagtaaagctacgcctacatctgcaaatatggcttcccacatagtggccattccgccggctcccaatagcaatactaacaatttcactccgaatgccattgatatattttgccatacgatgcgatgggtctgtttccctatttttatagcttccgccactttactgggttggtctgtttgtatcactacatccgcagtttctatagcagcgtcacatcctaggccacccatggcaatcccaacatcgctgagtgccagtacgggagtatcattgataccgtctcctacaaaagctacacgattttcagaatttgcttttaattgttctaaatgtgctaccttaccttcgggtagtaaatcgccgaaagcctgtgtgacacctatcttttcggctaaattagaaacaattgtctgtttgtctcccgataatatttgaatattattaatatttaagtctttcagttcgcggatggcttgtacagcatctggttttggtgtatccgccaatgaaagatatcccaaatatttgttttccattgcacataacacgattgtttctgtcatgtcgctgatttcatagggaaaagagatgccgtattttgataataaccgtgcatttcctacatatacttctttaccgtttgttacggcttttattccatatccggcaaattcggttattttcagtgacgagttaagggatatactttgttcttctgcatatttgacaatggcttttgcgataggatgattgctgaaactctctatagaggcgataagttgaagcagttctttttgcgaaacaccttcggctgccgatattgcctggacactgaatacaccttgggtgagtgttccggttttatcgaatactacggtgtttatttgggttatggcatctagataattaccccctttgaaaagaatccctttgtgagatgcggcaccaatacctccaaagtatcctaatggaatgctgaccactaatgcgcaaggacatgatatgactaggaatactaaagcccgatagaaccaatcatcaaaaacaaaaatgaattcaggttttatcagagagtataaataggggagtatgacaactagtatcgccagtcctgtcactatcggtgtataaattcgtgcaaaacggcggataaataattcggcaggggcttttctttctgctgcatcttgtactaaagtgaggatacgtgctaacgtactttgatcatacggtttgtttactttgattcgtaccaccttatctgaagcgatcattcctgctaaaacttcttcttgtttatatagagtccggggaacactttctccggttagggcggccgtattaaatgaagcggaatcttccagcaaaaatccgtctagaggtactttttctccaacttttacttcaatggtttctcctggctgtactttttccggtactgttattttatatgtgttgttatatattacagtggctgtttcgggacgtacatccaataatgctttgatgtcgctgcgtgctttgtgtacagctttgtgttggaaccattcacctatgagatagaacagaataacggcaataccttcccagtattctcctagatagaatgctcctgatacagctattcccattaaagtgaattcattgaaaactgattctaattttatttttttcattgtttctttttatttatgacaacaaagatagcggaaagaagatgcaactaaattgcaaattatattgtacctttacatcgggtaattttttatatacatgaaaaaacgatattgggcttttttgataggaagctggtgtttgtctgtaggaatgcaggcagctaaggtggatactttgtcggtacatagcgatgcaatgaataaagaggttcaggtaattaccatctgtccggataaagccatggcaggtgaaaaatgtcccgtactttatctgcttcacggatatgggggcaatgcgggaacatggctcgggataaaaccggaattacctcggatagctgataaggaaggaatcatttttgtttgtccggacgggaagaacagttggtattgggacagccctttgaacaaggagtaccgttatgaaacattcgtgtcaaaagaattggtgaactatattgataagaattttactacgaaagcggagagagggggacgtgctgtcaccgggttaagtatgggtggtcatggaagtttatggttatccatccgtcataaagatgtctttggaggaggaggtagtatgagtggaggtttagatatccgtccgtttcccaataattgggagatgaagaagcaattaggtgaagaagcgagcaacaagcagagatgggacgaacatacggtaattaatcagttggataagataaagaatggtgatttggctgttataatagattgcggttgtgatgatttttttctggaagtgaataaggctgtacacgaaaaactgttgaagaagaaaataaatcatgactttatcatccgtccgggtgggcatacaggcaggtattggaataatgccatagactatcaaatactatttttcagtaagttctttaataaatcgaaataataaaatggataagattgtttttatcacaggagcttccagcggtatcggtgccggatgcgctcgcaagtttgcttcacagggagcaagtttgattttaaatgcccgtaacgtaaataaactgagtgcattgaaagaagaattagaaaagcaatatggtgcgaaaatatatttgcttccttttgacgtgcgcgaccgtaaagcggcaacgtctgctttggaatcattgcccaaggaatggcaatccattgatatattggtgaataatgctgggttggttatcggtacggataaagaacaggaaggcagtctggatgagtgggatattgtcatagatactaatattaaggctttgctggcaatgacacgcctgatcgtaccgggaatggtggaacgtaaacgaggacatattattaatattggttctattgccggagatgctgcttatccgggaggtagtgtgtattgtgctacaaaggctgctgtgaaagctttatcggatggactgcgtatagatttagttgatactccattgagagtgactaatatcaaaccggggctggtggaaacaaatttttcagttgttcgtttccggggagataaggaaaaggcggataatgtatataaaggcattcgtccattgacgggagatgatattgcggaaacggtttattttgcagcttccgtaccggaatatatgcagattgcagaaatgttggttatgcctactaatcaagctacagggacaattgtttcacgtaaataaaagaggtggacagagatataaataaaggcggccctttaataaaagccgcctttattcttactttctcattttaccttcttaccttaaaaaaacaattataattcaataatcaatgattgacgtgcaccgactgtcatatttttggtaaggtcaatttttttgccactgataagttctttaccgctttttgaatcatttgtcattatgcggtagtggtcatttgccaccacttgttcggcatcggtgctgtttaggacaatgagttcagttttcccagaattagtacgtgcgtacatatatattccgtgttggggaatatggtacttaactgttttcttttccatcttcgtttaatttagtttggttttacggcggcaaatttatatgtttttcagcatatcttatataactaatcgttcaaaaatcataataaatcattcatttcttaatctatatcaataaaaaatcctcttccacatattagttgaagaggattttatttattgttgttcaatgaattacatcaagaacccaagtaaaataccggcagctacggcagaaccgattacaccggctacgttgggacccatggcatgcatcagcaagtagttggtaggatcatattccagaccgataacctgagagatacgtgccgagtcaggaacagcagatacaccggcattaccgataagcggattgattttgttatccttacctaataccaagttgaatatctttacgaagataactcccgaagcggtagcaatgatgaatgacaatgcacccagcgcgaaaatcaaaatcgaatcaatagtaaggaattctgaagcttgtgtggaagcacctactgtcaatcctaataagatggtaatggtatcaatcagcggaccgcgggcagtttctgccaagcgacgggttacaccgctttctttcaataagttaccaaagaaaagcatacccaatagaggcagacccgacggaaccagaaaacaagtaagcaacaaaccaatgatagggaacattactttttctgtatgagaaacgacgcgtggtggtttcatacggatcaaacgttcgtgcttggtagtgagcagacgcatgataggtggctggataaccggtaccaatgccatgtatgaataggcagataccgcaatagctcccatcaggttaggcgccagtttggatgaaaggaagattgctgtcggaccatccgcaccaccgatgatgccgatagcaccagcctgcatcggatcaaagcccattgccaatgcaatcatgtatgcaccgaaaataccaaactgtgcggcagcaccaatcaacatcagtttaggatttgaaatcaatgccgagaaatccgtcattgcaccgatacctaaaaagataagtggtggataccatccggaggtaactccttgatataaaatattaagaacagaaccttcctcatagatgccgactttcagtccggcttccatgttgaaaggaatattaccgatcaagataccgaaaccgataggaatgagcaacatcggctcaaattccttggccacggcaaggtatatgaagaataaacctatcaggatcattacgatatgaccaacagtagcattggcaaaacccgtatatgtccaaaagtcagctaggttattccctaaaaagttgataaattctcccatattattcaataattacaaggtcagtaccttcgagaacggattctcctttacttacattgattgcggtgatcttgccgtctttgtctgcattgatgttattttccatcttcatagcttcaaggataatgatggtttgccccttttttacggtatcacccacatttaccttgatatcaaggattactcccggcaacggagatttaacgcccgatttacctgtagaagttgcagcaggctttactactgtagctggtgccggagcagggctggttgatacaggacgaactaccggtttcactacagctttcggagctttttccatttccactttgtaaggagtaccgttcacttcaacatgagcgatattgtcttctatatctccaatggcaactttgtatacgttaccgttgatcttatatttatattctttcatcattttatctttttattggtgacttactttttgtggggagtttcacgcaaggtataaatcttggaactccacggtgaataactacgttttacacgggtaatggtaagaacggtttcttccacgtcatgtacatcgctttgcatttcatgcatggccatggcgatagcggcgaatacttcgcccggagcttcacccaatttcttttctttggcttcttgcttgtcggtaataccttttaccttcatggcattgcgcttgctcaggtttacagaaatcttacctacacatttgaagagaatgaaaagtaaaagaagaccgcagaatacaacgctcatagcagagatggccataccgataccactaccgtcatgttcttcgaatttttccatctttgcatgactgttgatagtcttgttattggtgctcggagtcacatatttgtctgcgctggaacctttcacctcccattcatttgctgcgtcgctgacacgtgcgtatgattggtttgcttgcaatgtgcctgccggaacaataatctgatccaataattttttgcctgaatcatacaatccaatccaattgtcggttgcggcattcagtgtgaaattagtgtggaaagtaccgcggttgggttcgccgtctgcccagaataaagcgtgctggcgaggtttgaccaaagtcaatacatcacctttagggataaaataagtagcagtatctccaggctggctgctcaccttcagtaaacaaccggcaaggtctgcgctaccaaatgatctgttgaatatttcaatccatgcgctgtgtactccgtagtcatcctggaaattgctttcattttcaatcagcacttcattcagtaccagcttggtgttcgatttctgttctccacaagaacataaccccaccatcagcagcaaagaaaggaatattcctatatttaatttcttcatgtttaattctcaatttttaatttttaattaaagaggaatattaccatgcttcttagccggattggttaatttcttagtctgcaactgttgcaatgcacggatgatgcggaaacgggtattacgcggttcaatcacatcatcaatgtagccatatttggcagcattgtaaggattggcgaacagcttggtgtattcagcttctttttcggctaggaatgcggcaggattttcctgttctttggcttcgcgtgcgtataatacttctactgcacctgcaccacccataacggcgatttcggcagtaggccatgcataattcatatcaccgcgaagttgtttacagctcattacaatgtgagatccgccgtatgatttacgcagggtaattgtcactttgggtacagtcgcttcgccgtaagcatacagcaacttggcaccgtggaggattacaccgttgtattcttgtcctgtacccggaaggaatcccggaacatctaccaatgaaacaagaggtatattgaaagcgtcgcagaaacgtacaaaacgagcacctttgcgtgacgcattgctgtcaagcacacccgccaggtatttgggctggttggcaacaatacctacagactggccgttgaaacgtgcgaaaccaatgatgatatttttagcgtagtgaggttggacttccaaaaactcaccattatctacgatggcgctgatcacctcatacatatcgtatggtttgttggggctgtcggggataatttcgttcaaagagtcttccagacggtcgataggatcggtacagtctacatagggagcttcttccagattgttctgaggaatatagcttaacaatttgcggatcatggctaacccttcttcttccgtcttggctgtaaaatgagtaacaccggatttggttgaatgaacgcttgcaccacctaagttttcctggcttacatcttcacctgtaacagtctttaccactttcggtccggtaaggaacatatatgatgtgccttccatcatcaaggtgaagtctgtcagcgcaggagagtaaacagctccgcctgcacaaggaccgaaaatacctgagatctgcggaataacacctgaagcaagaatattgcgttggaaaatttcagcataaccggccaatgcattgataccttcttgaatacgtgcgccacccgagtcgttgataccgatacagggagcacccattttcatggcttgatccattactttgcatattttcagagacattgtttctgaaagagaaccggcagaaacagtgaaatcctgtgcaaagatgtaaactaaacgtccttctatggtaccacaacctgttactacaccgtcgcccggataatgttttttctccatgccgaaattggtgcatctgtgttccacaaacatatccatttcttcgaaactgccctcatccagcagcatggctatgcgttcgcgggctgtatattttcctttatcatgctgttttgcaattgctttatcacctccacccatgcgtgctgtagcccggcgttcgataagctcttttattttttcaagttgattgctcattttacttatgattttacaatttacgattaaaaaataattctatttacgcttgaaccagactaaatatactgacttcaatcgtgaatagtcagatctcgtgtgttatggtttttcgcaaagctcggtcaggacgcccaaagttgatttgggatgtaaaaaagcaatttgcaaaccttcagcacctttacgcggagctttgtcaatgagacggatgccggtggtttcagcttcggctaacgcatttgccacaccatcttccactgcaaaagccagatgatgcataccaccgttgccattatttttttcaatgaactttgcgatagtgctttcggggcttgtaggttccagcagttctattttaacatcacctactttcagaaaagcggttttaactttctgatcctctactgtttcgatattgtagcatttcagacctaatacgttttcataatacggcagggcctcttcaatgctctttacggcaatgcccaggtgttcaatgtgtgagattttcatgatcttataattttaatagtttggttttatactcaagttttcagataaaactgcacaaagaaagtaatttcgagttaaataaagaaatatttcttcaattttatttcttatttgcaagatgcttcacaacactttagacaaaaagacaaaaatgagttaaatatagaatttgcacaagagtttgttcagccacttccaactgaagcggaaccagcggcgtgtactgctctgcttgccgccaaagcggagtacaaagtccctgtaaccgtgctttttgaacggtaatcctgcatccatgaattccaaatgtgcatatcctttttcgtaagcataggtaataggtgcccatacggccagaataccgggataaagaaaagcataggttttccgcatacctcctgagaaccacagataggcactttcttttgagaaaagacagatagaaccaccgatgattttgcctttatatttcacaagaaacactttggctaattctttttccgggttctgccatgctaataaccggaaaaagccgatgtccgggaaatgttttcttatctgtgaggaataggcttttttcaacattcgtgagaaatcttgtatatctttctcattgtcggctatttccatgatggcaccatttctcagagctttgtttatttgtcttctgcgagacatgctcagccgttcgtaaggagctttactgtgcagtgaattacgtactcttagccaattaatggcgaaatagttgttctttctgaaggctttgtatccgaatagcggattttccaagttgcggaactcgatgaggaacgatttgcataatacttcgttggtgagatgttccaatatttccccgaacaggtcttccttattctgttcttcatcaaaatactcgcctgtgccataaatttcgcatcgtttgatgattgcaggggggaacaggcgcacacttttccggatgactgccagcagtttgcctacaggacggtttcctatataggctacgataagcaaaggttcgtatccccgggtcatttcaaagacatgaaacagctcggtagaatggaaaatgtttgttcccggcagagggggaatggcatttcctttgcgatatgtacttaatctgacaggcatctctaattgcaaatttattgttttttgtttatcaatccacattctagttgtatatttgtgcagaaaaataaattaacagggtatattatggaacaatttagtgacttaataaagaacagacgcagcatgcgtaagttcacggatcaagagttgacacaggaagaggtagttgctttgttgaaggctgctttgatggctccgtcttctaaacgtagcaattgctggcagtttattgtggtagatgataaggatatgttggaaaaactttcccattgtaaggagatgggggcggctttcctagcggatgctgctatggctgtagttgtgatggctgatccgttggctagtgatgtctggattgaagatgcgtcaattgcttccataatgatccagttgcaggcagaagatttggggttgggaagttgttggatacaggtgcgtgaacgttttaccgctaccgggatgccctcgggtgaatacgtgcatacgttgcttgatattccgttgcagttgcaggtggtttccattatagcggtagggcataagggtatggaacgcaagccttttaatgaggagcatttacaatgggagaaaattcacattaataaatatggaggcaagtaaacgtggctgctgtcaatcataaggatacgtataaagcttctgcggtgtttctcattgtgatggggatgctttatctgatcgataagtttataggatttgcttcacacgggttgccatgggttatgcagaaagacaatctgttactgtatgcagctgttattttcctttggttcaaggtcgataagtcagtaggaattgtattggcgggtatatggctgatattgaatatcggtctggtgatagctttgttgggacagatgtctgcttatttgttgccggcggctttgttgctggtgggagttattttatatttagtttcgacccgatgatgaaaatagttctgataggagccggcaatgtggcaacccatctgggaattgctttacaaaaggcggggtgtcttatcttgcaggtatacagccgtacagaggaatctgcttctgcattggctgccagactttcagtagactacacaattgtgccggacgagatacgtcgggatgccgatttgtatattgtagcgttgaaagatgcagttttgcgacaattggctcctgtattggtgaaaggaagggagcaggccttgtttgtacatacggcgggtagtatgtctatggatttatggaagggattggtaaaacgctatggggtactttatcctatgcagacttttagcaagcagcgtgaagtggatttcaatactgtacctttttttatagaagcatctgctccggcagaagtggaattgctgcgtatggtggcagttcgtctcagtcctaaagtgtatgaagtgacttccgggcaacgtaggtatttgcatctggcggcagtctttgcttgtaattttgcaaaccatatgtatgcattaagttcacatatattggaaaagcaggggattccttttgaagtgatgcttccgctgatagacgaaactgccggcaaagtacatgaactttctcccacacaggcgcagacaggtccggctgtacgctacgatgaaaacgtaataagcaaacatttggagatgttggcggatgaggagtctttgcaggaattgtacgaaaagataagtaaaagtattcataatctccctttgtctgtcattcaggcaaataaagagggaaagaactcataagtggtatgataaactatgatttaaagaaaataaaggcattggtatttgatgtagatggggtattgagtgcggaaactatttatttgcaccccaatggtgaacccatgcgtacggttaatatcaaggatgggtatgcattgcagttggctgtgaaatgcgggctgcatgttgccatcattaccggtggaaataccgaggcggtgcgtaagcgttatgaggggctgggtatcaaagatgtctatctggctgctgcggtgaagacccgggagtatgcccatttgaaggaaaaatatggattgcaggatgaggagatactctatatgggcgatgatattcccgattatgaagtgatgcgtttgtgtgggctgccttgttgtcctgctgatgcggcacctgagataaaggaaacagctgtttatatttctcatcgtaacgggggatatggatgtggccgtgacgtggtggaacaggtcttgaaggctcaaggaaaatggatggctcatgaaaaggccttcgggtggtaatgaaataaagaaaagttatgttggaaaatttagaaaaatataaaataatccttgcttccaattctcctcgccgcaaagaattgttatccggcttaggtataaaatatgaagtaaaaacactacccggcatagaggaaacctatccggatacattgaaagcagaggaaatccctttgtatatagcttgcgagaaggcggctgcttaccggaataccatgcatccggacgaattgattattactgccgataccattgtatggttggatggtgtagtcatgggcaagcctcataacgaggatgatgcacggcaaatgttgtggaagctttccggcaagacccatcaggtgataaccggagtttgtctgactaccgccggggctcagcgaagtttttcagctgtgacagaagtaacgtttgcagaattgtccgatgaggagatcgattattatatccgggtttacaagccgatggataaggctggttcttatggtatacaagagtggataggtttcattggtgtccgtggtatttcaggtagttacttcaatgtgatggggcttcctgtacagcgcctgtacacggaactgaaaaaactataagtcagtatgtgaacagtaggggccgtgtttttgttatttatatgaactataaatggaaaaacaattatggcttataaaatagctttttacgacacgaaaccctacgacgaacgctcgtttacggaggctaatgagaagtttggctttgatatcaggtattacaaaggccatttgaatatgaataacgtggtgttgaccaaaggagtggatgtggtttgcatcttcgtaaacgatacggctgatgccgaagttatccgggcaatggcggataatggtgttaaactgctggctttaagatgcgcaggttataataatgtggatttagcggcaacggcaggtaagatgaaagtggtacgggtaccggcttattcaccttatgccgttgccgaatttacagtggcgttgatgttatcactcaaccgcaagattccccgtgccacaatgcggacacgtgacgggaacttctccctgcacgggcttatgggatttgatatgcatggcaagactgccggaattatcggtacgggtaagattgccaagattttaattcagatattacgtggattcggtatgaatgttcttgcatatgatctttatcccgattacaattttgcccgtgaacatcaggtggtttattgtactttggatgaactttatcatagttcggatatcatctccctgcattgtcctttgacagaacagacaaagtatctgattaatgattattccatcagtaaaatgaaagacggagtgatgattatcaatacggggcgtgggcagttgattcacaccaatgccttgatagagggactgaagactaaaaaggtgggatatgccggtctggatgtatacgaggaagaagagccttatttttatgaagataagtccgacaagattattgatgatgacactttagcccgtcttttgtctttcaacaatgtgattgtgacttctcatcaggcattctttaccaaagaagcaatgacgaatattgctcatactactctgcaaaatgtgaaagactttgctgaaagtagatctttggtgaacgaagtagcggtggggagagtctaatctcccctgtagtaatataataaggagtggcgggctataaagtccgcattcttttgaaccagttccctttcaccaaattcggggaattgtgcatcggggatatagtggttgtttattacatattccatcaggtccggtgggcatttggtcgggatagtaagcaggctgaatgcctcttgggcagccgttgcggcatcatacatcgggttaagagggtcactgatgtatttgcatatatctttcgccagtagaatacctttttcggaattcaccatcatgatgaaatccttatgttccttcatttggggcaaagtgtgattggaatcgtccggccattgtaatacttgggtaaggaaacggtgtagttccttatatccttccagatatacgatacgggcaccgtttgtgccttgcgtgaacaattgataggtatggtggttcctttccttcatttcatccgatatttcgggaatggcagggtatagtccttctatctcttcccaacattcggtttctccgttggtcagcaggtcaatccattcatgaagaaacagggcaagggggccacatggaatgatgaatttgtcggtttctgtaacttgtgcaatatattcttgtacagatggttctgtgagataagtgtgtccgaacagccagcgtagtttatggtttgcgttctcttttcctttgaagttcataaagaaatcctgtaacgtgtcattggcgggagccgtttcatactcttcatccaatatccggaaaaatgaatgcgaggtttcttcgatattcctgtccatcggattgatatacggatgtttatatggagccttctctaaagtgttccaaatgatgaagcggatatcttcttcattgatctcatcttttatataatccggccggatggtatagaaaggaagtgacgtatcatatagttccagatgttttttgatgaatgcttgccatagacctaaacctgaaatgacatcttcaaaataggcagcggtgtaaagacataatttcttttttatggattcgggaatctttcttatcgtacaagtggagtataatcggttagccagatcgacaaaatatctgtctgtagcctgttgttggatgtaaggatggatagccaaccaatcttttatgtataattttatggtttgcatattagtttatttgaattatttttattgcaaagatattcctttcattgtaaaaaggaaggagaatatcgggatatttactttatctttgcaatattctaactttgaaatacctataaaaatggaaatagatttaacaactcctgctttattattttctgccatatcgctgattatgttggcatatactaatcgttttctttcatacgctcaattagtgcgtacgttgaaggaccaatatcgtgagaatcattcggctgtgacagcagcacagattgctaatctccgcaagcgtctttatctgacacgtgccatgcaggtgacaggtatcggaagtttgttgctttgtgtggtcagtatgtttttaatgtatatacagttctaccttatatccgtatatatttttggactggcgcttgtgctgctcattatttctttggggatttctgtgcgcgagatttatatttcggtcaaggcgctggaattgcatctaagcgatatggattcctgatctatttttttgagaagatatttatcataaaggaacaggttgccagtgtgatacctgttcctactactccctgccatccaaaccagtgccaaaatattccggcaagaagtgtacctatggaaccgccaataaaataggtcgtcataaaaatggtgttgatacggttggccgccttcgggttaagagagaaaatcgtagtctgattacttaactggatgcattgcatgcctatatctatgataaaaattccgatgatgattcccacataggagttctgaccggaataaagcgagaaccacgctgcaaatatcaaaccacaaccgatgtaattcagtcgtttgactcccaaaacctgtacatagtttcctatatacgaggcggtgagagctcctgctatgccgcataatcccaataaccctacaatgttgtttcccgcaaaaaaaggggcttgttccatcttaaatgccaatgaagtccatagagcaagaaatgagccgaaagcaattccggcacgtaaggaagaaatacgcaactgggggtattccataaccaatgaaaacaaggatttcatcagatcactgtatctgcctttgaaattacacggcatgtcgggtagtacacgcatgatgatgatgacacatatcaccatcatcccggctgccacaaagaaaatgaaccgccatcctaaatattcaccgataattccgcttactacgcgcgaggccaggatacctgtcagcaatcccgatacaatcatacctacattttttcccttggtttcgggagtggaaaattgggcagctatggggataaagatttgtggcatcaccgaacaaatgccggtcagtagagaggcaaataaaatgagatggatatagggagtcagtgcgatggttagtaatgaaacgaccaagactgtgaaattgattagaataatggttttccttttaaataaatctcccaaaggaataatgaacagcaatccgatggcataacctatttgggtaatcattgctatcaggttggcggtgaactcggatgtttggagatcacggctgatgcggtttaataaaggttggttataatataaattggcaacggagattcccgcaataattgctagcgtccaaagtaaggaggcaggtagtccttggttttcttttaattcttgtttcatgctgcaaaaatagtaatttcatgaaaatcatgttatctttgtaaagaagaaaaatggaaatgaaaatgaaaatggaaatgaagaattggataaaaacagtctgttttctgttttggacctgtgtaatgtgtacggcgtgtattgatgatgatgtggaggaaggtactgttgatttacaaacaggagagagcattcctgttttctctgtggtaatggatgatggacaaataataacttccgaaactctgaaaggagaggtttctttgattgtgttttttcatacggggtgtccggactgccggaaagaacttcctgtgctgcaaaaaatatatacggattacggtcgaagaatccggatggtttgtattagcagggaagagagctcggcagagattgtccgttattgggacgaaaatcatttgaccttgccctattcggcccaagaaaaccgcacggtatactatcagtttgctaaatcgggaatacctcgtgtttatgtcatagataaagagttggttatccgtagtgttttcacggataacccgttggcaagttatgaagatttggctgaggctataaccgccagtttgtaattttaggcatggtattttaatttatattatttcttttggtagatggtgtatgtttatagcatacttttccctgttcatctttagggataatgaatgtggttgatgaagatattggtgatggagtatcttgatgtttattgtgttggctttttgaaaaaagttcctttattgtctttaatctctatcattccattatcggcatcaaataggaaaggaggaaagctgaaaaatatgtatatttcagtatcttttaatttatagagtttgggagttatttttttgctgacaccagatgggaatacttggtcatccatttcggtgaggatataataatctgctccctccctcaatacatttttgctaatcttggcttctgcttttgatttggcaataatatagaatccctctatatcatatttttcccaatttttatactcttgtccaagcaccatacttatgtttaaacataaaaccagtagtaataatattcttttcatatctatctgtttttaaggttattccaagttggtatcacaaatataagaattcttattggttttttcaaggaataagaaagaaaaatagagagtggaattttaaagaaaagtaattcctatccatatcagaactcctgctattagaacaatgcctaacatgattaattttattttgaagagctggtgggtttccgcttcttctttttcttgcgtttttattctgatctcttctaattgctcaagggatagatgggaggagtgcccttttttgttcaaatcaatcagtcggtttctagtttcattcaagcgttcctttcctgcctttcgtagttcacgattttctttatctcttctcatcatgtcattgatgcaacctaaagtacccataatctaactgtttaatttgaattcattttcacaaatatagtgttttttgcagttgcttttcttcatttgctaatttaatatgaatttaaaggaggaatattacttaataaacccgatgttccttgactgccggatataaatcattatgtttgtatttctgttgaacaagctcttgtaatagtttaatcatttaaaattagacattagggaagtcctttaaatttgatatatctatctgtatattagaataatatagctgattttacgaccacttgtcaagatttggtaaaatggtcgcaatatggtcgcaaatagcgcttcaacttagcctacttttaaggataatcagccacgtttacccttagagattcaagttccatttaagctataatttgcttcaattccattatccaatcacagctaattataagaagaatagcaagaggaaatgagtattagataggggataagcattgcggtacaactaaaataaaaatccccataaccattacggctacagggatttatatattagcaatgtattatattacttgctcaaagcagtagcaacgtctacagcacaagccactgtacatcctaccatcgggttgttaccgatacccaggaatcccatcatttccacgtgagcaggaactgatgaagaaccagcgaattgagcgtcagagtgcatacgacccatagtgtctgtcataccgtaagaagcagcgacacagcatccctgtaaccacttgctaatctgttatagatagttgtgttacagttagatattcaagtatattaaagaactccccagcttattagttactgttatattattaaatggtcgtaaataagtcacaaatgactaactactgacctttattattctgttgtttactctctcttatagctctctgatggtctaaacgtttctgttgttcaagcacttcttcccttgtagggggatgtttcttccattcttctattgacttgcgagtacgctctatccattctttgtgaaattcattgatatattccacgaatcttatgtttatgagtttgaaacaaagataatcattctcctttaaatcaccatgatttgctgcaacattttagtgaatgggggctatatgggaagtattctttagaaatgtagtagctaaaaaaagaaacagcataagagtttccttaaatgctgcttcaatcataaaccatatcccaagtttctattctctcatctggatgcaaccccttcaaatatgatagcaaatgtatcttctcgtcagtacgtatgcaaaatggcactccaccatagacactaatcatattgccatatttctttattgcttggtttatcttgataaggaatttctctttatcaagactgttatagacttctttaaaacttttagtagtccattctcctccatcaatatgagtgatgtttccataaacatcttcttctaattcatctaatgaattgtacttatcaatatagagcttatctttacttgtcctattgtcaaagagtttatggtaatatattcttatgtcatagttatctaagttaaattgatgactcccattaagattggggaatgaaacgaacttatgtctttcattttgtgttggagcttctaatatttttatcatagtcatatatcattttagaatttattatagatgctgtaatggctggtgtattcatgttgcttactcaaacaattcaagaatttcttcatctgccaaataacccaaaagagtgtcattctctgttggtacatagcaattctcacctgttgccatataatctccaacaacaggttcatccattttaagtggagtccaatatgtatcttctgtttccatcatttataaaatagtgttattaacacatttctcttgcccaccataaaaaggctctaatttcttcatctttgatattctcatagaatttgtctgggtctttccagtattcttctttagataagttaaatttatctagcacttcttctattcttcttacccaatcttccgctgtgattgtcataattatttgattttattgttttatagtaagaataaacagcataagagtttcctcaaatgctgtttattaatctgccctaattggtatggattattatttccgtttataaattactatatcactatgtccattgtcattgaggtatagctcctcttttgttatcttaacgactgtgtaaatggtattctcttctccccaattagttgttgtatagtaagtaacaaacatatatctgttagggaagtattcaaacgtaccactttgagtataatcttcactctgcttcgtataagtgttatccttgttaaaggtaaggatttctccctctacttcccctgttccctcccaagtacctattaacaactctaaagtgttatcaacaggaagcgaaagttcattatcatcatcatcgctacaagctgtaaagtttacagttaacatgatcattaataaggtcattccaattaatctaaatgttctcattttgaattaaaatatttattgtaaataaaaatatattctgtaatttgcttaaacacatcacctgccatcaatccaccacttgcaggtagtccatctttatgaatagaaacaatgatagaatattggggagcattggcagggaagtaaccacagaactctacaatatagttcccattttcaagctgtactgttcctgtttcacctgcaatttgtatcttatcagacttggtaggttgtcctaagccatcagttaccacatattccaatgcctgtttcagactgtcaatgttggcttgacttactatctgtggattgataactgttgtactgtctttgtaaagttgaggttgtaccatctttccactattagcaatagcattataaaaggttagcatttgtataggggtaatagtttgattatatccaatgcagaaccatgcaaaggctgtatcactccaaccgctatctttaggagtaacaaagtatgcaggtttcagattagctattcctgcgatgctgtctggtttaccataactcatattattcaacagattgaagtatgcttgtgcgttgttaccaaatgctttctccattgttttataaacagcaatgtttgaacttgaagctaaaccttgcttgatagagatttcaccatatccacctctatgccaattatggtctttcagttctctgtcttgtatagaatagcttccattgcccacatctaccgtatcagctaatttgactttacctgtttccaatgctgccaatatggatatagggtgtatcagtgctgattcgtatgcttgggagaagttctcacaaggttggtagttagcactgtctgtgctttcaagtccaaccatagcctttatatgccctgtctggacttccataatgatagtttgtccagataaggcattgagttcagatagtttattctctaggatagaggttactttaacttgcaaagtgctatctatggtggacattagttctatagtttcctgtttggactggcaagaagctaacccaataaatgctattattgttaggatagtatgtcgcatgataaaagattaatcaatgggtaatttatgctttaaagatttacacaaatctctatatttcttttcaaactctcgttcttcgatggtgttgccattctcatcatagaaagttctattaaagttagctcctgttgttgtagtttcaatggcaattgctccgttagaatgtaatgctatagcttttactggtgctccattttcaacaaccatatagcaactctcatcagaaccatagactgtcccattaaaaggttcatcttgataataaatatattgtttggagttgacttcttttacatttacgtctggagtataaactttactactgcaagaagtttgccctacacataatgcaaccaatatgaggttgctaataatctaaatgttttcatcttttctattttagtttgataatcccaagtcttaatgcttcttctgcatcaaaatatttgcacgataaagtccgttcattataattcccatataacattgctattgcataatgtattccacaatataattcaaaatatgtctgaaaatcttttgtacatggaacttctgtgtatgattctttatttgagtacttttgtatcaagtcaaaatctacgcaatcaagtgttgggaaatattgtattccttttattagatattctccttgttgatgtggtatatttatataggtattttgagatgtaaaagattcaaatattaaaactccaccatctccatatatgggaggattcgcatatttaaaacaattacaaagctctttgaagtcttgagaacatagataatcatattcattctgttttaatgttttatgcgaacaagtaagtatgcagttatagaaaaaccttactttttcccattctttaagagcttggtcaatttttatttcttccttcgtaatagttcctctgcaagtatattctatataagcagtagcaaatgggttatatttccccaaaatagtcgatggcatatataacctacattgagtatcaaaaaataatggatgatttaagctcattcttctaattaaatccataatctaaataatagaaccttacctgttccctatggataagctgttaataaatgtaagcattcggcctcgtgcgtgtttctctccaagttataataaagtcaaaagccagacgaagcatgtctggcttttgactttattatagctttcctgtttatcctttccaattaaatggcagtaaatcggtgtaatcgtttttctcttctctttctttctcctgtaccctaatcagcacgtcctgcatccatagttttgggttcaccttattttccctacagcatcccatcagtgaaaagaaaattgccgctgcatgtgctgcctcatgtgatccggagaagagcgtattttttctgtttaaagtcaacggccttatagaacgctccaccggattattgtcaatgcagaactgtgcgtcattgacatatccggacagttgttcaaagcgtgtgtacatatagaacatggccttggcaataggcgatttatcgaccgtatgtccatattcctccttgcaccatttttccagttctttgataatagggtacgatttttcccggcgaagctttaccaccgcctccccttccagatgttccattctgattttctcctccacggcatacagtccgcctatttttccaagtgcatgccttgctctgggagggtcatttccttccgcttccacaaagttgcgcctgacgtgcgcccagcagcacagatgcaactttccgggtagcgtgtcgaacttgtcatatactgcaaagccgtcactctgtaccacccggacctgtcctgccagcagtgtgtctattccgctgctgccacggcccttgtgatattcaaagaagggggtatggaaccggggcagatagaagttccacatatacccgcggtgaagagcaccgggccggtcgctttcaagtacgggatggggtgtctcatcggccatgacgtaatagctgtccttgaccagttcacgaagttcattatagattggttccagacgctgtgcggcagccatcatccagttacttacggtggaaggactcagatggattccttcacgctcaaagatatccagctgtctgtgcagaggcaggtggtcgtaatatttggcggtagcaatgtgggccagtacactttccgaggcattgctgtggggatgtgccattacgggcatgggagcggttatgatacgaccgtcggcgagccggtatttaggacggatgatgcgtttcacatagaatcgggcgggactgacagcatactgttcgctcacttcctctcccagcttcgtcgctccctccaacgaaaggccttccggcatgggaatgataatctcctcacggggaagggacgggtcgatgggcttacgggcgtggggagtgatctttttcgtgaagcttttacggaaacgattgtagccattctccgatgtgacggatttcccagcggttttctgttcttccgctaccgggtcattgacatcggacggagactcgaaacagatgctcagctggccggcatcttcgggaagatgacgtttttcactggatttaccccataaacggcgtgtcaagtcagccaatttccatctcagatcggcaatgacggctgtacaggccgagatttcttcgacctggcgggaatactcctgcaaagaggcttcgtattttctctgaagttccgcatgctccttttcaaggcattcatgttccttgcgcaactcttcgtactcttccaaagtaagggtaataaccggttctttcactgtacatccactttttattatgtggcaaagttatcaaaataaaactgcacggcttatagaatggggaattacttttcaactgttttccgatactttttaacagtaagcagctcattcaggcgattccaggaaatttgaagaaaatccttcttccgttcctcctttttcaagaggaaagaaccgcgattcagacgacggcattccagacggtattcgtcgtcgcaccgataaaggatatgcaacctgctacgggagcggtcgggaaaaatatgacagctctgctctgacacgcaggaacccgtgtgtcggatgacctcgccacaaagaccgtcaatacctttatggaaattacaaccttggggataaaggtaataagaccaaaaaggactgctgcggaaaaggccaagacctaaagggagaagtaggtcctgaggggaatggataccaaggctggaagacgaaactttataacgacggccgccatcaaatatgaaaagaacagaatcaaaatggttagactcggaaaagagagtacgtagtttatcactttcgctagaaaattctaatactgaacacataatggattaagattataatgaagccacaaaggtaggaaggaaaagaggggaaaaaaacacgcacgaggccgaatgcttactaataaatcaagcattgaggaacatataatctagtttgattaccaatgctataacggatgcaaatataataatattattatgaataaaagaaatataaaaggaataaaactatataaaggttttatatttagtcatttagataagtaataaaatatttcaccttataaatataacagctcaaattattatcatttgttttgatttatggactttatgtcagtatattgttggatatttaaaaggtgctacctgtggcttaactaataagagctgagatagttataaactctgtaaacttatggaattgacttacttctataaggctgaaatgccaaactgccaagactggactttagatgtgtctaagctcaatatttcattgatttgggacagaaccattcagaccactataaagatgtatcttaataatcctgtcccaattcattagaagctcaaacagtcataagtctgtaagatttcttcctgccttaatcccaagtatcttttagtaatggcaacagaactatggttgaacagttccatcagctttactaaggcaagttcagcattatcgctgttcatattatagacctgtctaccaaaagtctttctaagtgaatggcagctaaagttcttaatctttaacctgtacttcttcttcacctctttaagaatgatgttaattcgttggaccgtgaagatagtgcctttctgacttataagaattggtgcattgattccaacaggatttatatgcccgtagcactctttaatatgctgctgtaattgggggttcagtctgatagttcttactttgcctgtcttcttctcaattactgtaaactcgtcagtacctaatatctgcttccatcttagagatagaatatcagatattcttaatcctgtgaagcatcccaaactaataaggagtgagattttataattctcgtctttggctaacttccttatgaggttcattgcatcagaccaaacaagatagtctgcggttgtgcttgaatatttaagtgacataatgttctgttttataatgaaacgaatagaagtgaatattaattttgagttggatttactaactcattgattactaaaggaacattcactaatagcagaagtgaatatgataaggacacccaacttggaaattgagtgccctttacctttattataattctccctcgtcagcaaagctgtaatatcctgcatcagtaagtatgaggtggtctaaaactgtaattctcataagtcttgcagcttctttgacctgcttagtaatctccatatcctgcctacttggtttcagattaccacttggatgattatgcgcaaggataatggctactgaattggtgagcaatgcggcttgtagaatcactcttatatcagcacaagtttcagtaattccaccctctgaaatgagcgtgtaacctaagacttgcttggcttggtttaagaacaagactttgaaatattctttgtaacagattgtacctttcttatatgtaggaagcaagtatttataagcgtcttccgaactatatattttactccggctcgttgaagtggatttgtaagtgagttccacttctccaatagtataattcatgtctaatattttactattcattctatcaatattaatgtggtggtggaagaaaaattggacagttaaaatggtctgtcgccatattcataaacaagaattgaattgcatactctatcatagaatgagaacccacagcaagtatggaagtagctttcataaactgctgcatattcaccatgcagcctgctgttcctatccaaaaatgaatcaaacttgtgcagccaatatttaagtgcttgcaagcgtttgatatattgcagattattctcacagtaacataatttctcttgtaaagaagtgatatgattgatagcattttcaattttagatttatccataatgtataatatttaataggttggtagaaataaagaaaggacacctaacttaatagatgtccttttaattaatggtatatgataatgtagttacttcttggaatagtgatatttcatggagaatatataaacctctatcatatcattatgcacagaataaataagtctatgctctgaattaattcgtcttgaccatttacctgccaattcatatttgagaggttcgggcttgcctattccactgtaaggatgttccaatatatcagcaagcagtttctttatgcgcttagctatattggggtcattcttcttccaatagttccaatgctcttgtgcaacaggagtaaatatcagtttcatagttcatccaaatttacttctattcctctgcctgcctttaagtcttcttctcctttacgaatatcattcatggtctgttcagaggacataatatattcagtttcctttaaagaattgtattcttccaaagaaatcattactactcctgtgccattgccacgattgataaccactgtgtcgcaatcgtcaataactgagtcaatataacctttaaggttggctcttaaatctgtgtaattggctgttctcataagttctcctttctataacgcaaaggtatgtacttatttgcgtacttgcaaatataaatagttaattattaaacataaagaaaggacaactaacctaatagctgccctttcctctctcaatcaataaagcccatttaatcaatgaaccatttgtaacgctcatccccatgtaaagccgcattgattccaactgccatttcagtggcattcaaagaacggtctaagaacgaatcaatatagcttgacttgttagctcctgtaagcaagttatagaacttccacatattaagctcacttccaaagctgccaaaattatcatcgtgaatgtatgctttggctacgctgttaatctgcgtatcagtgagcaacattcttggcaatgccttttgatagcctgttggcaagcattggtaaagtcgcatcttgcctataatctgtgcgaattggtgttcactcatggaagtgttgcctaattgctgcatcagataaagatgcttggcaggattgtagttattgaacagttccaatgctgcacgatagagttcacttgtactgctcactcttaaatcgtccttgtagccatctgtaaagatgcacatattgcaacagacttggttcttgaagccaatagccaatctgaacagctctggaactttcttgctgtacaggttcatctgattataagccctcacacctacgatagacaagttcagtttgtttccacccactgtttcatagatggtaggaacatcaatgctgaaagctgccctctcataataaatggtcttatcagattccaacagttggttggctggcttatggatagcttcagggattctgcctttgataatatggctcacacgaatatctgcctgttccactctctcaccactaaagaatgattgggctgcatcctgtatggtttccacaaatgcggcatggttaatggtaagttcgttgtccttagagaacactggggtaatgcagtcatgtttcagatgatgcaaggttgcttcctgtgtgttggcttcaatgaaatggttggcaggtcttacaggttcatccatgatgatggttgcttcctctgcatattcacccaaattcattctctcacgattgtttgccatagctggcatgataactaaatttctcataatgataaattgtttaaatggttattgattgatttaactctggaattggtaaagtccatatcatttaggattgctccataacgattttgacttcactacaattcgctgaattacatttaagcgtattacaattagactatattaccattatgtctgtattgtgtatctctttaagaagtccatgaatgatgtgaggtgaatagtaaaattaataatggttgaggaggtgggtgggtggctgccaattttcattttacttttactgggtgagagggggctaaaatagtggtatggtatctcgtacaacattttgggatttggggttataaaatccactttttgccttaaatgttgcacccaactttaaaaatttaactttatgcacttctaaagtcagaataagatagacttgggattattcgtaccatctattaatataataataaacagtacgaaaaatcctgcttgcctgttatttgggcttgaaagtcattttgagaaagtcttttggaggttggggaatccactctttacgctgttgggctatatcattgtctaatagtagttcctttggagtaagttcaaatccgttgggtatgaatttcaacagacctgcattatataaatccaaattgtaactctctacatttttcttacccattcccaatttgttagccaacttattagaagaaagcaatatcttgttatcttctgctattaataggagcttgatataatagcctttcactttaatatccaaattcactttcataaagaggtaggacagtgttataaagttggggcggtctattggtgggatgcagtaaagacttctcattgtaaattcaataagagggtggttgatgtcttccctatatctctttctaaccaacactgcttctatgtccttattgaaattctttagagctgtttcttcctctccagtccgtttggctaaatccttaattctccatctgaccttataatagtcatttctatataaggacagacagaagaacctgtacaaattgggtggattgagtttatccactattgatttattaatggtggcatagtcctgcctaatgttacttgtcctgctttgcaggtgtctttgaggtatcttcatattcattagtagctgattgaacattattggtaaacactaaatctttcttctctcgttccatcttataatagtaggcagtcccaaagtgtatcttggcttcctttctattgtggaacttctttcctgttggcaaatggattatcatatcaatttaaatattaatgagttaataagccaacttctgcaatgatatataattggtagtaacctttccattcttctttctccttgtctttagatagttattaagattagcccataatccaatgtgaactttgttatcttttactccctgtttaagagccttagcccttatctgctcataagtaaattcttccattttagatattctgaatagtttgtaagtttgtcaatctatgtgtggaattatctgtctgtggtactgtaaaagtagtaaatccacaggtagggaactaatgataagaccacacatttaagaatcagactttatgctattcagaatatctaagaacttgggaagagaaagcccacctgtcacatgggctttattattgatggcttatgcagcctgttcttctttgattattcctttattctttaggtattgagtgagcatttcagaatagatagcgttcacaggttctgacttcactttatttataatcttaatgctgctctcattcaatgtctttatggtacttagagtttcatccaatccaatcttcttgttttcaccattcggtgcgtaattggcaagctgggtgattgcatcaatcatgtagcgatgtctgatagtgtccttagaaatcttcatgtcagttaaagtcttgatgattgtatcgcctactgtcaaatcatattcttcaagttgggtttcacaaactccctgcatggcactgttccagactttcaaacttagtgtcttaccaaaattatagtatttggtgattacgctgatgtttgctttcaattctaatgccttttggaacaccttgctaaagaactcctgttgagtggctaatgctgcgttacctgctttctccaatccgttaaaaccacgacttaacacattgttcactcctctgtacttaccaaactcttgtaaagatgcgaactctttgattctcacattttctataatgagttttgtatcatccttgactatggcattgaggttgtgctcgtggtagcttgcccattgccaatatccgtttgcagtatcaacaggaacatagacattgggagtgtctttaggtatgatgtttccgttaaggtctttcagttcaatgtccgcgttgtaaaacaaggtggcttctgtgatgtagagaggaactttatcaaatttttcattggttatcaagttcttgccacattcgatgtttaccttgcttactgccatgctgtaaacagatgtagcgatgatgatttccttttcctctttagtgaagattacctgttcagctgtgttggtaacttcattccaaacttctattttagtggctggaagttccacctttttaagtgcttcaaagtatgcggtttcagccttgcctacattgacctgtgcggatttcttaatattggcttctgcatccttgttggcttcaagtacgctcttggctctcatcaaattctgacgggcttcttctactgcttgcatcttcataactgttgtttcatttactttttccatctttttattattaagttgttgaacttcgtttgcattggcaacttcattattcacattctcaatagcaatattttgtgccatagttttgtacgcttgacctttacagcattaggttctatttattgtacatttaatttataaccgtccagcctatgcgcacttggctttctgattacgctgcaaaggtagaatctttctgtcctcgctataggtaataattttaagctctaatttattacccttagtttggaactttgccgtctttcctttggcggtgcaaatatagaatggtatatgggtaaggtatgggtaataaaaatcccactacttttattccccttagagaatagagtagcgggatattataaattaaaggagtggattacattctgaatgatggatagacactgttgatagtgcttggttcaaagtccttatattgttttaggaatgctttaagtgtgtcattctctgtttgtgaccagcacgatttagtggatagtttggtaaatgctatcagttggcaaatgaggtcagtttccttttgtgaatatttagcacctttcttccttttaaggataacttgggattgtgtgttgaagaagtcaaggaacatctttgcaaaaaaagtgatgaatggagaatccttggtagaggtggaagttcccaatctccttttatggctcattattccaatgctgtttaaatcgtcctgttgcatcatcttgagagtagcgtcagctatgtaatgaatggcagtgggattgtctattataatgttacgttctccctctacacatatctttaatgtagtggattgagtaaatatgcttcctgtcttttcatcaaaactttctacattatctataatagctttggtgaatttaagaagctgttcgttgggggattctcccatgtctattccctctatataataatggtaactgtaatcatagataaacagcagaagcatccaaaacttatctgcatctaaatccaatcctcttataaattgctgtattaattcatgtttcatgtagttggcataattgaaatgctctgctatcagacctttgttatatctgtctccaaatgtccgcaaagtttctgacacatttatataaatgggctggttacagatttcttcccattcttctgcacttacttctgatttgtttattctttcatagccataataataagggctgtctgtatcgtagtcaaaatctgggatatatagttcttccaatatggatatatattctaataagtctttctcctgttctatattgtctttccattcaaatttagttatgggattcatatctctttatatgtttaagttttgacgaacaaagttaaaaaataatccccacctgcattgctacaagtggggaatttgtgggtaggatatgctttagtaatcagaatctcctgtaaacgtatccatgagtttatccatctgctcacctatgcacttgtctattagctttgcatagtgggcagtcattcgtgtattggtatgtcctaacattttagaaacgacttccagagatatgttattggctaaagtaactgtacttgcaaatgtatgcctacttgtgtggaagcaaattcgtttattaattccacaaagtatagctatatcctttagatatttgttgatgtccgcagggtcttgaatagggagtaatttctctccacctttgtacttatccaatatcagtttggcgatggggagtaggggaatgcgtgatagaacccctgtcttaaccctacgtttcttaatccatattctgccagtgttatctttctcaaagtgttctggtgtcaaggtcttaatgtcaatgtaactaagcccagtgaagcacccaaagaggaacatatctttagctcgctccaatcttggcaggggagtatcaaagttgataatcttcctcaattcttcttcgtccaaaaaatctatatctacgggttctcgttctaccttataggtagagaatgggttgaatgccatataggagttggctactgatagatttataatcttcttcaatagctttagatgtttggtagatgagttctgtgccatgcctttatcaattcttaggaatgaatgaaaggattggatgaagtttagattcagttcacgtaagtataaatcttctcttttgtacttctgctgaacaaactcccttaataatctgatggtatagacagacacccaatgagtagctttagaaactccattgcctaccaacttctcttgttcttgattgtgttcttcaaagacttcaaacagacttctctcctttagagattctaccttatcaaagtaagcgtcataaagaatttgggcagttatgataaagcctctttccaaaagttctgcttctttctgatagagtttcgctttaatcgcttttaaataattgttgagattctgtgtctcttggtcttttccttttacttgctgtttggttttgtcccatttttcaatagctatttgtttacctgtggagaaagagtttctttcaccatttacagtaatcataacttcaataggaacattaccattctttcttgctttgctttctcttataaaaaagagaatagaaaatgaacttcttaccattgttctatcatttaaaattagacttatggaagttctttaagaatgatatatctatttgtaatatagatggttaattgaaattttgtgaccacttttgaaaaaagaggaaaatggtcacaaattggtcacaaaatagcttcattttagctccattttaaggataatcagccacgtttacccttagagattcaagctccatttaagctataatttgcttcaattccattatccaatcacagctaattataagaagaatagcaagaggaaatgagtattagataggggataagcattgcggtacaactaaaataaaaatccccataaccattacggctacagggatttatatattagcaatgtattatattacttgctcaaagcagtagctacgtcaaccgcacaagccactgtacatcctaccatcgggttgttaccgatacccaggaatcccatcatttccacgtgagcaggaactgatgaagaaccggcgaattgagcgtctgagtgcatacgacccatagtgtctgtcataccgtaagaagcaggaccggcagccatgttgtccgggtgaagagtacgacctgtaccaccacctgatgcaactgagaaataaggcttacctgcaagaacacgttctttcttgtaagtacctgcaaccggatgttggaaacgagtcgggttagtagagttaccggtgatagatacgtctacaccttctttccacatgatagctacaccttcgcgaacatcatcggctccgtagcattttacttttgcacgaggaccgtcagaataagcgatttcacgaactactttcagttcacctgtgaaataatcgaattcagtctgaacgtatgtaaatccgttgatacgagagatgatctgtgcagcgtctttgcccaaaccgttcaagatacaacgcagaggttctttacgtactttgtctgcttttgcagcgattttgatagcaccttcggcagcagcgaatgattcgtgacctgccaggaatgcaaaacatttagtttcttcgcgcagcaacatagcagccaggttaccgtgaccgatacctactttacggtcgtcggctacagaacccggaatacagaatgcctgcagaccgataccgatagcttcggcagcttcggcagcgtttttgcaacctttcttcaatgcaatggcagaacctactacgtaagcccacttggcattttcgaaacagataggctgagtttcttcacaagttttataaggatcaagtccggcagcttcgcagattgcgttagcttcttcgatgtctttgatgccgttttcgttcaaagcagcaatgatctgtttgatacgacggtcttggctttcgaattttacttctctaatcatattctttcctccttataattattcgtgacgtggatcaattttcttaacagctccctgttcttcagttacacgtccgtaagtacctgtaactttcttcaacgcttcgttagcatcagtacccttcttgatttcgtccatgaacttacccatgtgaacgaattcgtaaccgcagatttcgtcgttcttatccaggaatacgttcttgatgtaaccttcagccatttcaaggtaacggggacctttagccaaagtaccatacagagtacctacctggctgcgaagacctttacccaagtcttccagaccggcaccgataatcagaccgccttctgagaaagctgactgagtacgtccgtaaacgatttgaaggaatagttcgcgcattgctgtgttgatagcgtcacaaaccaagtcggtgttcaatgcttccaatacagtctttcccggaaggatttcagcagccatggcagccgagtgagtcatacctgagcaaccgatagtttctaccaatgcttcctggatgataccttcttttacgttaagggttagtttacaagcaccctgctgaggagcacaccagccaataccgtgtgtcaaaccagagatgtctttaatttcttttgattttacccactttccttcttcaggaataggagccggtccgtgattgggacctttcttcacaacacacatgtgttctacttcgtgtgaataagtcatattctttacgttttttggtaataaaataaatattcgtaaccacgtgaaaagattggttattcttttcgcctacaaagttagtcgttttattcttttctgcaacttgttgcccgtcactttttatctttaaataaaataaatttattgcaggacagcattttgcaaactagagttgccaaaatgttttttctttccgatgaaatttctatctttgtacctatattataatgataggaatggaagcaaataaaatagcaattacggacgaagctttgcgccgaggtgcggaagagggcatggatggtttcttgaaggtgtttatagataaatacttggaggtgacaggaggtgttgtcaatgcggaaacaatgcctttgctcaatggttaccagcattcattgttggggtatcatttcttgcgtgaagaaataaatgaaggtggttttgtacaattgatacagaatggttttggaccttatatctttgataatccttttgcaaaagcaatgcggcagtttggagcgaaagaatttgccaaattgatttatagcgcgaagaaaatatatgatgagaaccgtgctgatttggaaaaggacagggatgatgaggaatttatggcaatgtatgagcaatacgaggcctttgatgagttggaagagcagttcatggatatggaagagtcggtaactgcccggattgcagaatatgtggacaatcatattgaggagtttgcggagattgtatgacaaggacttttgcgtactttgtcgggtataagctcatgcgttttgatataaaaaaagtaagttggcttcaatagctaagtaagatacgttcgttggctgacgaacctatgttgcttggtcaagcaagttaacttactttttttgtcttgttattccggtgtcattccatttattgtttcctgataaaccaacctttgatataggcggttgccagtacggcaagtcctgccgccaggcagattcccgtaaacaccagtccgtaaccgttcaagaaagctaccggagcgaaagttatcagagaaatctctaccggggcgatgaacaagtaagccagtgcatagttatccaggcatcggctgcgcattttggggtctgcaacgcggagcaatgcgatgcccatagccatagttcctgtaaaccatccccatgtgaagatagctttctcgaaccaacattctttcattagtttgcgggccatgaccagaacataaatcagggttgcgattaatcctgagactaacagaattaataagggtatgatgtactctattacaacagatattttaatggaagcaattccaaaagctaccagaaaatcggtaaaggctccgctgatgtggcctatggtttgcgggcagacataatcactggttcttgttttgtcgaatatctttttgatgaatatacctaccacaaatgcacaactgaataccggcagttcaaaccccggcataaagtgggatactgttttgctgatgcagtatccgcctaatgctatcactgctacgatgataagattgaaggtcagcgggtcaatggagatggaagagcaagaactttcacccatgctttcccgtttgtcgccgggcaacaggcctgtctgtaattcgtgaggaaggtcatcgtaattggcgaggaaggaggtgtgccctttctttgtcccccattttatgatgatcagtccgataatgactgccgctacgataccgaaggtggcggcagtcatggccaaagttagaatttcgtcatatccgaactggctgaaagcctgtccgatggctgctgctgtaccgtgcccgccgcaatagccgcttggcatagtgatgccgaaggcagggttcaagggccatatccggttcaggacaagcaatcccaacagtcctccaaaagcccattgcaacaacattcctgcctgtgaatatgcccacatgctgcctatattgtctgcatctcctttggctgccttttgtgagatgagggggagagcgccgaaaatgaaggctatcaatatgccggcataagttcctgtttgggtggaaagaggtatgatgccgaaaccgtgaggtcccaaggacagtcctataaacccggccaacaggctgggggggatgaacagcctttggatgaatcttatttttactctcatgagtttgccgagcagtagcagtactgagatgatgcctgtatcgacaaagagtgtccacggggtgaaatcggtcataaatctagggcttgtttggatgtattcgttgaagaatacagcgttcataaatagtttattttaccgaatcggtaggaatggaaattgatcttatcggcaaaaataatgtataggtatcatgtaatatcttaggttttattgttattaagttgttttgtttcaaagataggaaataaagtggtactatagcccaactgcttgttcttttatatgttaatttttattaatgggttaatggcggataggctacaagtaaatttcggtgaaaaaaatagttaaaacaaaagataaagcaagtcttatcagaggatgaaacatgaataaaaaataatgttaaaagacaagtggcgacgcagtatttaagccaatttttcatttaatcattaaaacaataaaaagaattaagtttctttcttggaaaccgattcttttatttaattttgcaaaccctaataattataaagaagaaaatgaaaaaaatgaaattggcagcaatatttgctgggttagtatcggtgtttacttttagttcttgtttgaatgatggtgatagcggccccaattatgatctttatgagatcgttactgtggaagatggtagtatttttggtggacctgtcctgaaaggagatgcatggggatatacttatactccagtggcttcaagtgtattggccggtcttaaggcatctgatggcagttattacaagcgtgtgcaggtagggatcaaactgatggaaggagaagcgattacagaggggaaaaagtcttataaggtaagtgaagttggcctaatagctattttgaattataaagattttaatgttcaggctgatacattgaaaaatgagtatgcactagtgtcattggaggattctaataataagatatgggctataaatggatatgtcaacgtaccttttacctttaaaactaaagaacagctgaacatgaatgatttccatttatatgctgtagaagccaaggaggatacattggtgacaagacttcgacagaccaaaggggctgatgatgcttatcagacaggaggtgctttgattagtttccatatgccttttaatgatatggaatttcgtgacattttcgatcaagtagtgcctaagagtgatactattgtagttaaggtgactgcaaagggagaaaatgacaaagaacttgtttctacagtgaaatgtagtgcttcgaatatgcaaggaagttattaataatactttattatatagtgaaatccccttcagttacggttgaaggggatttttatttaatggaactatgtggttcaatttataagataagggggggaagaaatttgacggggcctacttcttattttcctgttcatatctttctttagattcagtatataccttctgcgtgtgaaaagagttgacatgaatttttaaacggttcgatctttctgctgccgtaataacaacatatcacattcgttcctgttgcataagccttttctcttccctgattaagcctttttatacggatgtattctatctccatagcctttggagttgtttccataagctttggagttatctcccaaggctatggagttaactccaaaggcttgcggagataaaacaaacaggaagaaaacccttaaccatagggcaggaaaggtttagagatatggataagatcttttaaggatgaatctgattataaagttacgcatatgtatcaaaaactttgcaggaacatgaaagaaacgtcctctgatcatctcccgcaatgggtgtaattccctttggcagacttattttggtctgtcatacaaaccatccctaaaaaatgacgagtgttcatacagggtatcacaaacaaccgcatgaaaaaaatctccactaagtttctactgctccgaaacaagactgtttcaagacgataaataattaaaaagcaaaaaacggacgtacattccaataagcttttttatcatatccttgcaaacagactctatcccaattaggatattcaggatcatcaatgtgccaaagtaacatccagcatctgtctttatcatattgggaactgcaactgaagccaagtctgtaggtatcactaaactgcggtaacgaattacctactttagataactgtatagtcaatttatccagtgtttcttgtccccatcctgtgtcgtttaggccgttactggtttcatttcgaaaatctcttggagattttccacaaatattcaccagcatatcaaaccattgtccgatactcggtacgaaccatggactgcgattaagtccatcaggaattttgttactgtttctatattttcttattgattcaaaagcactgtaactaccctgtacattagcagtataattcttcaacatttgttctgtttcagaataaccgttcatattcttctcaatttcatcatcttttgtcattggagtaatcccttcttcgattcgttccattcccccccaacgaccggtccctaaattttcaaaccccattacataagcatgattccaaccgttttcattgcattttacatctgtcatttttttagaatcgcaagtaatgaccattccaatagcattctgataatcatatattttcccgttttcttccagcatgccgtctccgggatgtatctctattcgtttttcggtttcattctgaaagacaaaatctccgggataaagttttctttctgtgcttcctttgccgggtacagggctgattactttcagagtatagcatttcccagaagcaaaagtgatggaactgcccgaatagtttatctttgtattcgtattatttctgccgtcggcggttacatagcttccggtaattctggcatttttttgtgatgggacaatggcgcagaattttacagaatcgatctgatatggagtaatgccattcaagttcacattgatagctgctgagtctgttcctaaaattcttgattctttgtggtaaacaaaacctgcattttcgggtgcaaaacaacctatgtatgcttgtggttgcagcacaagcaatgtaaattggtgtttaaactgcaggttcaggattattccggaagaattgccggtagtaggtacgccagtagcaatcagcaggtcgctcacagtatgcttttcttttgtggattggtctttcgaaggttgcagtttctcattcctggtcaacgaagcaatagcttcatctgtatcctttgaaacatctagtgtgatattcttcctatatggatagtatgcgatgtaactcgctccatcataccaatagagtgtcttgctgttttcaaccggattccaactatcatttgacacgttataaaccaatgggatattgttaatgtcatccactattgtgccatcttttatggagaatataccaatagaatcaccgtctacaaattctgttttaagatgttcatctgtcacagaagcacgtgtggaaggcttttcggaaccgggaacgttttcaaacccggttgctgttgctcgaacagtgagaggagttccattgtagcagtccgttctttttccattatttgtttcattttcgtcggtgcatgcactacaaatcaagaggatgctccaaaagattatgccggtgaaagatttcatttttctttgttattatcttgtttaaaattagcaccttagtacaaggctgatttttatttgtcccattaattcgttatttgtttctcttctgttccatttaccgtttcagaatccgtgcctccttcccatgatgcgatatcattttctgacatcacggaaatagtttttcttgagataccgatggtataacttacagaagctcccggattccaagtgtcagtagaaggtaaagattgattttctatgcagatagcttgagtaatggcattattatttccgtcttttgccgcatattgataagtgatgctgaactgacttccttttccggcaggaagcaggaaaaaagtagctaacaatttcttttcttccgcaatagtattcggtacagggaaattggttatgtcagcggtaaaagtttctttcttgtcaggtgatggaaatgcccacagccagcctttgtcgctatcagtcgtaggagtataataggtcagtattccgctttttattcccgtaatggagaaaaaggttacggacttttcctccgtatcatcattactttttacataaacattgatcttggttagtgtatggcgcagtttaaaacttacattgccattgttttgattcataaccggagttgcagcgagaaaatctatctgtttgttttcggctgtgggaacggtataactcaacatcggaaatccatttgaactctctttgtcttgaacgaaaaagttgctacttgctgtttcatttatataaggagcataagcaaagaaactgattttatctgttgttgaattgtccggccagaacttgaccggactataagaccatgtgccgtctgtttgtttaccaacaagctggttatacatgaaattcggtgttgcggcatctttattgaaatttccgtgtgtgaagtaggcaaacacaccgatagtttcaagatcacttgttgtggtatactctttaacagatctcattaccggaacgtttcctgaaaagctgatagggatattttcttggggaaatttgttcgtaccctcttcctgggtacaagctcccaataacaaagttgcagcaaggaaaatgccatacaattgtttcacccttatgctttctgtttttcgattcatgtttctttttctattttattgtacgtccgtgcttttttaaccgtagtgacagggaagaaacattcaaccctgtccggtctgttttctttccatagccagtatgtatcatgttttggctgcaaaaggaaattatttctctacattaatatcagagtcgctatcatcagtccaaccttccatattatcctccaccgtaatcttaatggcattcatcttgatagtcaatacgtaggtatgtttcgttcctttcttgaacgtatttttcggtagtgaaacttctttgtttgttatggtacttgtcagattacttgtgtcggtcactttggttacgatgtcataattgattttcagttttaagtcacctgcgttggtggtaccgtttttgttatttaccggaataaagtaaagagcttctgtatctgagaataacgcggttgcattctggtcatcacttacattgatagaacttttattatatccccattggtcggtggttgttttatttaaaaaatcactcaggtcttgttctgttgaaaaataagatgcgtcaggagatatggcttcccaagtgtcgttatcgaatttataaacagccttgttgtaaagtgttgtacttcctggatctaactttaatcccgttacaaaaattttggtatcagtacctaagttcacatctggcttcaccttgatattggctatttgggtaagtacgtgactaaacttgaactgaaccgtccccttattactttcattagtttggtcttgtatggcagtatggcagtctgttaccaaatctatcatatctttccagttattagaagtctttacctcaaaggtgattgtcggagcgcctttggcattctgtcctgataaagttattttttggtctgttccaacttccggtttggattcataaggcgcataagcaaagaatgttattttcttatcatctattggccaaaaacgtaaattagtatatccccaactatcagaagtccatgtagcatgttcattgtacatgaaattaggtgttgtgtttcctttttcactattccatcccgcactgcttgtctgataggcaaaaataccgaaaccggcatttgctttcaatgtggacgttgtagtttccgttcctctggtctgtacttccgtatatacgtccaacccgattgtccggttcgtatccggattcatttctgtcatttcattctgtgagcaaccagctatagtcagtgttgccatcaccatcaataaacttttcacttccattttctactttttttaaaattaatattataactacccatatctgtcatatatctatatcgctgttcacttcatcgttccatttatctacatcagcgtcaaatcctgagctaccttctgtttttacattcggcacggtcttttcacatgccatgtcaataaaaacgctcatagttccgtcttcttcatccaaccgtcttattgccaaatcgttaaaactttcttcaaatatggtcttcccgtctactaactttgctttcagatgtaggttgtgtggaatctctacatcgaagccgaacacactaatagtagtgctcagcgttccttctgttaccgagccggaatcataaatgggattgcttaagcgtagcacttgtgttactgtcttttccgaattttgtttcgaaacgagaaatatggattctgcaatgccgtctaatgtgcaggtagcttttcgtatgttgttcattcctttgatacggattttaaccgttattttttgagtcagttttttgggggtgaagcgtaagtgacaactattttcgttcctggtggaatttcggttactttgttgggtaatggctgatgaatagttttccggcatatcagaagtcacttcaaagccttcgatataatcagcggcaagttcgtcaggactttccataataattctttcagaggatgattcgttccttatttccatcttctttacataggcttctagcgtctggtagttttcttctcctctgaaacagaggttaccaaaatcatcgaatgaacggttgaaaaggacgacgttgtaacatccttctttcaagcatagggtcttgtatgtacggtcacccatcagtgctacaaaaggagtgctgccatcggtagggtagaatatggcggtagcaccataatcctgctctttttcattcagtcctgactgactccaatcggcactgattgttattgttgcttcgggcgaataagtcagttcgcgtcggttacaggcaactaacaagaaaacaaaaaggtaaaggatatataatgtcggggatattctcattttgcacctcctttctttgccttgtgtttgagtagccataccagtgtatggtaattcctagaaacggatgtataacgataagtggctatatttatggtttgaagtacgttcaatagggatatttgcaataatgggcgactaaattcatatgagaaaaggattcttgtttctttgtttggtaaaaggcggatgagttgtactttttccagcttattaagtaaatctttccattcttcgttttgaaggaggaatttgaccggttgcagaactttgctagaagaaaggtcatgcagtacggcgatggctatttgtgcacgtgtatatacggataacatgataaacttactttgttaagtcattacttaccaagtaatagcttatatttttctcacagggtgaggaaaagcgttttcttattctgtatttaataagaaaaaacatttcgtcggatagaaaaagatgtaagaaatatgattccgtttttgagatgtcaaaaatggaaagaggtgtcgtgtaattttgtaaattagttaaagtactgacagatgcaatattgtgcttgtgcttatgtgtttttctataattgaataaaatatagtggattaatacagatttataagctttttctttggatttatgaggaaatattccctactttgtgaaagtaatcatccattacttggtaagtaattcttcttttatttgaatggctgtcatatgatattcctcatgccacttccttttctccattatgtgctactaccgagattatcagttcgtcattggctatatctaccttttcgttttcaaatggtttcaagtaagtttctgtcaccttaatggaagagtgtcccaatgccttgcagataataccgatatttactcctgcatgaaatgctaatgtcgcccatgtatggcgcggcgtgtatgaactgagctttacatcaggcagtaacaatgtcgctattttttctagcttcaagttgaagttgcgcagtactcggagatagttcatatatagctctttatctttttttatttttccatttttctgactctgttcctttgctgcgttttttttgtctagaatcggaaatagataaatggaatcataattcatattcttgaacttctctatcagtttcattgcttctttaggaatgcgcactgttatctgtcgtcctgttttgtgacggctatatacaatatattttcctttcacatcttgttttcgtagatgggcaaggtcaatgaatggcattccccggaatagaaacattagtaagaaatatgccaatgcacattgcatctctttgggcaatttttctatatcggtgtgcagtagtgtattcatttgttttgtatccagtgctcgtttggtctgtgattctacctttgtgtatacattatcgaatagcttcgggttataaggcaatatttttttatcggcaagtcggttatatacagctttcagggttcgcatataggttgatatagtattcaaactcaggcctttcggtactccatgttttctatctgaccttttcttgtcggtctttttgtttcttgttccttccagtctcatccattcctcatactcttttaacctgccagatgtgaaagcttcatctattggcacaggtgttccttttcctccgtaaaactccgtaacggatttcagtgtataagtatatgtatgtactgctgaccattttttgtctatttccaactgtttgattactacttgcatgtaagatgccaagtctggtaattttatggcttttgccacttctgcatttttttctttgtcatccataatactttgattttaatttcgcatcgtgcataatttctgtaacagctatgccgatgggaaagttttgggatgcgaaatttttattttgacctaatgaatttagaatatcactggttgaatatatcgaaagataagcatatattctccggaagttatctttctttttgattaaggtatagaagaatttctctaaatgtattattatgagatgaaataatcttcgaatcaaataaagaaagtctgaatctataataaaagtaggcttatttttttgattcccccaagagaagtatgcgtttttttattcgtttattccagtgaattaattacctttgcatttcattgaagttgaactgaggtaaatagattaggcattgaattacaaagatttatttaaacgagtaatatcgctgatttcatctccggcaaaagcatgggaggaaattggcaaggaagaggataggcgtaaagtgctgggagcatttgtttatcccatgataggtttatgcggattgtccgtttttataggtacattcattgggaatacggcaggggtcgctgctttccagatagcaatgacacgatgttgtgctatatttgtatccttgttcggaggatattttttggcggcatacgccatagaccagttgggcaagaaactgttaggacgtgaagaccagtatgaactaaatcagcagtttgtaggttattctatggtagtgacttttgtgctcgatattgtcagtgggttgttctctatttccattctccattggatattgcaattttatactatattcgtggtgttcgagggtgcacgtaccctgatgaaggtaaatgaagagaaactgacacgatacaccttgattgcttcagttattataattgtttgtccggcattgattgccgctgtgtttaatgagttatctgttattttaaattaatgaaaccgactcctattaatataaagaataagcgtgcatcgttcgattatgaatttatcgatacgtacacggcaggtatcgtgctcacgggaaccgagataaagtccatccgtttgggcaaagccagtctggtagatacctattgttattttgtgcaaggcgagttgtgggtgaagaatatgcacatagccgaatacttttacggctcatacaataaccattctgcccgtcgcgaacgtaaattgttgttgaataagaaagaactgcggaaattggaagaagccggaaagaaccccggttttacgattgtccctgtccgtctgtttattaatgagaaaggactggcgaagctggttgtcgcattggctaaaggtaagaaacaatatgataagcgcgagtcattgaaagagaaggacgaccgtcgcgaaatggaccgtatgtttaaaaggtaagtgaaatccgtgttatccgtaccccaaaaatagacttatggctacattaaaacaactaattgacgagagagttctcattcttgatggtgcaatgggaactatgatacaaaggtataatttgtctgaacaggatttccggggagagcgttttgctgagatgcccggacagatgaagggcaataatgacttgctttgtcttacccgccctgatgtgataaaggatatccaccataaatatctggaagcaggggctgatattattgaaacaaatacgttcaatgcccaatgggtttcgatggcagattatcatatgcaggatttgtgccgtgagattaatctggcctctgccggacttgctcgcgaaatggctgacgaatataccgcgaagacccctcataaacctagatttgtagcaggttcggtaggtcctaccaacaaaacttgttccatgagtccggatgtcaataatccggccttgcgtgctttgacatacgatgaactggccgctgcctatcaggaacaaatggaagctttgctggaaggaggagtggatgcgcttctgatagaaaccattttcgattccctgaatgccaaagcggccatttatgctgcggaaacggcaatgaagaaggtagggcgtgaggttcctcttatgctttctgttactgtttcggatattgcaggacgtactctttcggggcaaacattggatgcttttctggcatccgtacagcatgcgcctattttttctatcggcctgaactgctcgttcggggcgaaacaattgaaaccttttctggaagggctggctgcacgggcaccttattatataagtgcctatcccaatgccggacttcctaacagtttgggacagtacgaccagactccggaggaaatggcttcagaagtgaaggaatatatcgatgaaggattagtaaacattatcggtggttgttgtggtacaacggaggaatatattgcaaaatatcaggaattgatcgtttccggttctgcctgggtatctcctcatatccctgccaccactcctgagaggctgtggctttccgggttggagctgttggagcagactcccgaaatgaattttattaatgtaggcgaacggtgcaatgtggccggatcccgtaagttcctccgtttaatcaatgaaaagaaatatgaggaagcgctaagtatcgctcgcaagcaggtggaagacggtgctttggtgattgatgtaaatatggatgacggtttgctggatgcccgggaggagatgactactttcttgaatctggtcatgtccgaacccgacatagcccgtgtacctgtcatgattgactcttccaagtgggaagtcattgaggccggactgaaatgcctgcaaggaaagtccattgtcaattctatttctttgaaggaaggggaggagatatttatagaacatgcccgtctgataaaaaaactgggagctgccgttgtagtgatggctttcgatgaaaaaggacaggcagatacttttgaacgtaagattgaagtctgtgcccgtgcttataaaatattgacagaacaggtggattttaatcctcatgatatcattttcgaccctaatgtactggctgtggctacgggtattgaggaacatgataattatgcggtggattttatcaaggctaccggatggatcaaaaagaatttgcccggtgcacacgtcagtggtggcgtgagcaacctgtcgttctccttccgtggaaataactatatccgtgaggcgatgcatgccgtgtttctttatcacgctatccgtcaaggtatggatatgggtattgtaaatcctgctgcttcggtgctctatacggatattcctgctgatgtgctggaacggatagaggatgtggtcttaaaccgtaggcccgatgctgccgaacgtttgatagagactgctgaggcgttgaaaaatacggcgaccggaacagaagcggtgaaacaggatgtgtggcgtgaagaaccgatggtagagaaacggcttcagtatgccttgataaaaggcattggcgatcatttggaagaggatttggcagaagcggttaaactgtatcctaaagcagtggatattattgagggtccgctaatggaaggtatgaataaagtcggagaattgtttggagcagggaaaatgtttttaccgcaagttgtgaagactgcccgtaccatgaaaaaggcggtagcgattttgcagccgcttattgaggccgacaaacaggaaggtgtccgcagtgcaggaaaagtattgatggctaccgtaaaaggggatgtgcatgatattgggaagaatatcgtatcagtggtcatggcttgtaataactatgaaattatagaccttggcgtgatggttcctgccgaaatgatagtcaggaaggctatagaggaaaaggtggatataataggattaagcgggctgattactccatcattggaagaaatggcgcatgtggctgtagagttaaagcgtgcggggctggacattcccattatgattggaggagccactacttccaagctgcatactgccttgaaaatagcacctgtttatggaggtccggtcattcacatgaaagatgcttcacagaatgccttggtagccgcccgtttgctgaatccggaatcttcttttgagtttgtggaaaggctgaacaaagaatatgaggatcttcgtctgaaaaacagtgccaggcaggtaaaaacggtatctttggaagaagctcagaaaaataaattgaacctttggtcataaaggagtgccccccaaaagttttgtgtttaacttttttggggggcacttcataaaattacgactttttttatctgcccattttattcgaaagaataagaagctgtttgctagcaaacaaaacagtatcccgcctgaaataatgggttattttaggcgggatactgttttatgttatggatatatttttaggactgcttagagtttactgagaaactcttccgcttttttcagattttcgggtttgccgatatcaagcaattgcaagtcatcttctacatagcactggatgtcgaccctgtgacatatggagagatagaaatcgataatggaatattttcctttgggaaggagatgtaaaattttaggggtggtcacttgtattccgctataggcatattcctggtattccccttctctataccggaatcctgccggtttggtttccatggtgtccttattgacccagccacataacagattgtcgtcattaaacaacaggtaacgggaggtcttgcgtggactgactaaaagggtggcattgatgttaggactatgctggtgataatacatcagactttcaaaatcgcaattggaaaggatatctacgttgtggagcaagtagcattctttccgcataactcctaaggttttttcgattatctcttcctcatccatccctttgttcagattttcgaatatcagttcatacggggtttcgccttttggggtaaacatattctcaggatggtataataaatggtatgctttttccaaaccgccgccggtatcaagcaggcagtctgtttcgtccgagatttgtatgttgactccaaagttctggttagcttccagaaaagcaagaatctgattggaaaagtggtgtacattgatcactatttcatcaaatcctgctgctttcagctttaagatgatgtgctctaacatggtttttccacctaccgttactaaagctttgggacgggtgtctgttataggtttaagtcggctgcctagtccggcggcaaaaatcattgctttcataatgttctttcaaatgtttgttctatattctgctcacggtgtatgagttctacttttacaccgaattttttattgatatgttctgccatgtgttgcgctgaataaacagaacggtgttgtccgcctgtacagccgaaacatacagacagattgctgaaacctcgttccatgtatctttttactgaagcatccactaaagaataggcagcatttaaaaatgggaatatttccccgtcttcttccaaaaaacgaataacaggctcgtctaacccggtgaaaggtttgtaacgttcatattttccgggattgtttacggcacggcagtcgaaaacatacccgccaccgttgcctgtggggtcgttgggtattccttttttgtaggcaaaactcataaccttcacagtgagttgccgtttttttaagtcatctttaaattgtttcagttcggtcaggtcttttagtacggaacacaggtaggaatattcggggtattcattatgaagcaattgtcgcaggttctcgatggcgtatggtacactttggatgaaatgtggcttcttttcgaaatagccacggaaaccgtaggctcccaatacctgcaaggtgcggaagagtacgaagtgacgcaactggctaaagaaataatcacggtctactggtttgtatttggagagggcgtctatatattcttccaacagttcgttgcgcagggtttcgggaaatttagctttagcctgccataagaaagaggctacgtcatagaaaaacggtcctttacgtcctccctggaaatcaatgaaccagggtgctccatcctttatcatcacgtttctgctttggaaatcccgatacataaaagtggcggaagaactgcgtagcagtacatcactcattttttgaaagtcatcttccagcttgtcttcttgaaactccaggccggtagctttcaaaaagcagtatttaaaatagttcaagtcccaaaggatagaacgttggttgaattcggcttggggataacagtgtgaaaaatcaaagccgtctgctccggcaaattggatggaaggcagtaggcggatggtcttgcgcagcatttctttctcctcttcggagaagacgctggtcgcccgccctttttcaatagcgttgaacaacaggatatctcctaaatcttcttgcaaataacaattcttgtcttcagaacagatgtatacttctggaacaggaagacctttcttgcggaagtgtgctgccatataaagaaaggcttcgttttcttctttggaagtgccgtatacgccaatcagtttttgggttccggtcagccggaaataacgcctgttggaaccggatgagggtaattctacaatctcttcgggtacttctccgagataggtttgatataggttctgtaaatcctctgtaatcataatcatattttggaacaaagatatatattattctccctttcttggctgatttgcaaagaaagttaatgctttagttccaaattatgagaaaattacttgtttttactctttcatccgtatcagtgcatttgaaatgatagcagtcactccgcctgttgtaatgccggatgagaaaatattctttattgattccggaaattgacatagtatttcaggaaccatttctacacttaaacctaaagcgaaactaagtgcgatgactaatgttgctttccggttgttgatcttctgtgctgcgataatgcgaatgcctgctgaagctactgttccgaacatcagtaaagtagcgcctcccaatacaggttcgggcattagggagaaaattaatcctacactgggaaataatcctaatagaataagaaaacctgcaatgtaatagcctacatatcggctggctactcctgtcagttgtatcataccgttattttgcgcgaaaacggagtttggaaaagagttgagaatacctgccagcatcgaattgaatccgtctgccaaaattcctcctgaagcacgtttgatgaatgtttttccttctacaggttctcctgatatcagtgaattggcagtaatgtctccataggcttctatggctgttatcaaaaatactaaccccaaagctatgaatgcggagaagtcgaaatccagtccgtatttgaatgggaggggaatattgaaaccaccaaaactttgtactgccgagaaatcaattctaccgagaccccaggcaactaaatatcctataatcaaaccgataacgatggaactcatgcgtaggtagcggttggaacttctattaaaaaggatgatgaggataagtactagcagagctagacctagattctcaaaacttccgaaagtgccgttgctttgagcagagacacccccgccacaagctgtgatacctacttttatcaggctcattccaatcaaagtgactacaatgcccgataccagaggggtgattattttgcgggtatattttaagatgcggctgatgaccatctctacagatgatgccacgatgcaagtgccgaaaatcagtggaagtccgcccagcatacctgccgagatgatgggaccgataaatgaaaaactggttccttggatacataagagaccggtgccgatgcctcctatccgtctgcattggataaaggtagaaatacctgaggcaaagagagacatggatactaggaaactggtggtttccaaatccagttttaatgctccagcgatgataagaggcggagtgatgatggctacaaaaatagcaagtaaatgctgtatggcagcaaaaatggcctctcgtacaggggggcggtcgttcaatccgtaaatcagtccggtattggattgggcggtttgagattcctgcatggggttatcttattttgatttcacaattgtccagactttcaatgatggccaatgattctacgcggatacctgcattacgcaaataatctccgccatgttggaatgctttttcgatgatgaatcccattccggacagttcggctccggctttttctaccaaatcgatgatacccttggctgcattgccgttggcgagaaagtcgtcaataaaaagaacacggtctcctttggacaggaaatctttactgacacatacatcataagaacggtctttagtaaatgaatatacactggtggtgagcatattttccattgtgacgggtttctttttcttggcgaagacaacaggaagttccagtaagtagcctaccatgatggcgggagctataccactggcttcgatggtcataactttattgatattggtagaggcgaaacggcgtacaaattctacagcaatggatttcatgaggataggatccatttggtgattgatgaaattgtctactttcagtattcctccttcgaaacattttccgtcccgtaaaatgcgttcttttaatgctttcattcaaactgtattttataaatgagtcgcaaaagtacgtattttgctgcattatgccaaacgtttgtacaactatctctacagaagcctatttacttaatgatcaggaaagccggaataaataagcctgtggaagcataagctggtgtggattaaagaatgtttatttccacaaactttagtttatatatttggtgtgtacttcttttcttgataatttagttctcaatataattttcttagtttagtattcttacttggcgaagatattctaatgggaggaaatgactgaatatgatgtatatttttcttgtcttttatgatatctgtcggtaggtaaacatttaaatttaaccattatgaaaaagatatttttatcacttgtattcctttttggtgtaggaacttttgtcatggctgatgataccatgaaagtaaagaatgatacagttgccgttgaagacggatttaaaaacatagacctgaaagaggttcctcaatctgttaaagatgccatagccaaaaaatatcccgaatcaactcttaaaagtgcttctctttctctgaaagaagaaggggtgaaggcatatagaataatatatgtaaccaaggaaggggttgaaaatagtattcttattaatataaagacggctcctgctaaaacgactcctgctacaaagtagtttgacaggtagtatagaattgaatgttttattaatatattgaaagccaccttgctatggtggctttttttgatgggataagtttttttcctgtcggatttagattttatatgtatcaaagaacaggttgaatttgtaagaaataggctatatgcttatatttgaacatagtttaaaatcaagtttataatcaaatagaaaaagtatgaaaagacaattatttacagtgttagtgtgcatgacgatgtttgctgttacatcttgtggcgaaaagaaaggaaaggataaattcgaggagcgtatagaaaaagccaaagaatcggttgaagatgtggtggatgatgccaaagatcaaattgaggataaagccgatgaggttggggaaaccttggataaagctaaaagcaagatagaaaaagccaaaaagaaacttgatgaggctaatagagattgagaaaaattgattatggatgaatggaaagagattgtcggctgatttatattaaaccagccgacttaatttatatttctagacctttgttcaccatttgttataatggatattttcggtcttgaatttgtctttagcttcttcccgatgttgcggataacctaccggaatcaaattgaaaggaatgatatggtctggtaaagacaagactgacctaacctttgcaatgcggtcgttctccggatagaccgcagtccataccgctcccaaccccattgattctgctgccagcaacagattttcggatgcggcagagcagtccagcatccagtacctatctgtttctccgttcagggctttgcttaaatcaccacaaaccacgatggctagcggagcctgtgccgtcatcttggcataaggcagttcggcggccagtttatccaatactttacggtcatccactaccacgaaagcccagggctgcttgtttactgctgtcggtgcagccatggcagcttttactaataaatccactttttctttttctatcggttggggtgtataggtccggacgctctttcgggcaaagatattttctatagccgtgttctttcctgtttcttctttttttgcttccatattgttacaacctcctgtaattagtaatgttattgaaagagtaacagttgtcagagttttaaagattgttgccgcattcatttttattattgattaataattgagatggaattctaccacagcttcaattcctttgcggaatatatccagagagaagttttcattgggcgaatggatggcgtcactttccaatccgaatcccatgagaacggtctttatacctaggatttgttcaaaatcgctgatgataggaatacttcctccacggcgtacagcaagtggtttttttccgaatgccttagcaaagcctttttcggcagcctggtaggcgggcaaggtgatggggcatacatatccttcgcctccgtgcatcggggttactttaacttgtacatattccggagcgatagactggatatagtccacaaacaattgggaaattacagcgtggttttgatgtggaaccagtcggcacgataccttggcatatgcttttgagggaagtactgtttttgaaccttcgcctgtatatccgccccagatgccacaaatgtcaaaagagggacggcagctgttacgttctaaagttgaatatcctttttcacctttcagtgcttttacaccgatggcttccatgtattttttttcgtcgaaaggaatttgtgcaatcatctcacgttcggctgccggtacttcctctacatcgtcatagaaatgggggatagtgatgtgtccgtcttcgccaatgacttgggctaacatactgcacagggtattgataggattggctaccgctccgccgaagtgtccggaatgaaggtcacggttcggaccggtcacttctatttcccaataagccagtcctcgtaaacctgtggtcagagagggaagatccacgcctagcatactggtatccgaaacaagaattacatcggctttcagcaattccttatgttccttgatgaaggtattcagactgggagaacctatttcttcttcaccttcgaaaataaatttcacattgtgtttcagcagtccgttttttactacgtattcgaatgcttttacttggatcatggcttgtcctttatcatcgtcagctccacgtgcccaaatgtgtccgtcacgaatttcaggttcaaaaggctggcttttccacaggtccaacggctcggcaggcattacgtcatagtgggcataaatcaatagggtaggagcatcattgcttacatgcttttgtgcaaataccaatggattgccttgtgagggcattaccatggcttcgtctgctccggctgccaacaaaagttctttccaacgtaaggcacaggccagcatatcgtctttatgttcgggtaaagcactgatactgggaatacggatgaggctgaaaagttcctccatgaagcgcgcttcattttctttaatgtattgttttatttccataattgaatgattcttatagttgtgtagttctgtctatcagataataatccaaaatggtcatggcagccatggcttctacaatggggacggcacgcggcagtacgcaggcatcatgacgccctttggctttcatggtcgtgtctgtgccgttgatatttactgtatgttgctccatcagaattgtggcaactggcttgaatgccacacggaagtaaatgtcttgcccgttgctgatgcctccttgtattcctccggaataattactttttgtttctacttttccgttattattataaaatacatcattctgctcactgccttttagctccatggagtcaaaaccttgtccgtaagagaaaccttttacggcattgatacttaacatggcatttcctagtgcggcatgtaacttaccgaatacgggttgccctagtccgatagggcatcctttgatgacgcaactcactaccccgcctattgtatcgccttctcctttgattttccagataagttctgccatttccttggctttctccggatcgggacaacgcacatcgtttgtttctatcaagtcgaggttatagcttttgtaatctttatcaagtttgacaggtcctacctgtgaggtataagctgtgacactgattcctagttgtttcaatgccaatttggctaaagctcctgctactacacgtgaaatggtttctcgtgctgatgaacgtcccccgccacggtagtcacggattccgtatttttgcatataagtataatctgcgtgtgaagggcggaacagattcttgatattctcgtagtcgtttgaatgttggttcttgttccataccacaaatccgatggggcagccggtggacttgccttcgaatatacctgaaaggaattccactgtatcaggctccttgcggctggtggtaagtaatgactgtccggggcggcggcggttcagttcctgctgaacgaaatccatatcaatcttaataccggcagggaagccgtcaatgacgccgcctactcccggtccatgggattcaccgaaactggttaaccggaaaatattaccaaatgaattgaacatattgcttgtagttttaaaagtttctttccgtaaagataatgattttagggataatatacttgattgttgctgaaaaattagcagaatggataaaaatggggtacggattgtatgaattttacagtttggaataagaaaaactgtaaaattcatacaatccgtacccggaaactgtttcttaaggatggaaacaggtatcttttacgagttagaattctaccttaggtgctttatcggctccttcctcagattcaaaatatgggcgtttgtcaaatccgaacatgccagcaagcaagttacgggggaaagtacggatggctgtgttatatgcccgtgctgtgtcattgaatcttttgcgttctacgctgatccggttttctgtaccttccaattgtgcttgcaactctttgaagttctcattggctttcaagtcgggataagcttcggtgatagcgagcaggcggctcaatgcactacctacttcgccttgtgccttttgataggcctgcattttttcgggagtcaggtcatcggcgctgatctgcatctgagtggctttgctacgggcgtctactacggcttgaaaagtttctttttcgtgtgaggcgtatccctttactgtatttaccaggttgggtattaaatcagaacggcgttggtactggttttctacattgctccacgctgtgctgacagattcatccatttttaccataccattataagaggttattccccaaatggcaattaatacaatgactactattacaataatcgttgactttttcatatgtatatactattaaaattatgaatattcttgttcttaaaaacggcttccggctcctccgcctccaaagcttccacctccgaaacttcctccgctaaatccgcctccacttccaccgtggccaccaaaaaatcctcctcccattccgcctataaacggccctcctcctcgggggcctttgtaattttcatctctcgaccgttctttccgtctgaggatatgtccgcaatttctgcatttatatactacttcttcagtctttgttccgttacttcggtctataactttggaagaaagacgttgcagtttgtgttttttgcagtgggggcagcgtgttttacgccagtttgcatacaatccgatgccaataaatcctccgaaaatcacaaaaaagatgataatgaattccaagggatcatcttcgctttcgtcattgccgatattttccatggaaccgtccaggtagccgtttacggcccgtattcctgctaccattccggcattccagttattgtccttgaaatagggcagcatatagcggttctgaatccgtttgcagatggcatccggcaatatcccttcaaggccatatccggtagcgaattgcacacaccgctcgtcggtggaaagcaagatgaccaatccattgtcacgttctttttgtcctacgcccgtttcctgtcccagccggtgggcaaaatcaaaacaatcacctccctctatgcctgttaccgctaccactaatgtttgtatacctgttttttgctctaaagcgtagaggatgctgtccatagtggtgacagcggtggatgaaaggataccgtcgggattgctgacgtagcgggtacggttttgcaaatgtaccatcggtatgtcttttatggcatattctttggcttgaagctggacggagcctagaagcatgaaaaaagtaagtaaaaatgtcaaatttctcattggatgtatttgtctacaaatgcttttactttttgggtatattcttcagtattgaacagataggaatgtgcatggtctgcttccggaactatccataatgctttgggctgaggttttgcctcatacaatttgtacaccatccatgtgggtacgtagtcatctttatcaccatggataaagaacatgggcagatggcatcgggctacctgtttcaatgcggatgcttctttgaacccccatccatattccagctggcataaccagtcggcggtgtacattaacgggaattgaggcaagccgaattgtgctttcagttctttggaaaattggtcccatacgctggtatatccgcagtcctcgacaaaacatttcacatagtcgggttgcggttcgcccgaaaccatcatagtggtggctgcacccatcgagattccatgtactaccatgctggtgctgtcaccgtaaattcgattggcaacctccatccattgtgttacatctttgcggtctaaccatcccatttgtatggcatttccaccgctcaggccagtgtcgcgtaaatctggtaggaggatgttgaaatccagttttttattgtatagataacctatcatcatcatgcggatggcattgtctgtatacccgtgtactataactgcggttttggctgtcgggcggctggaagccacatagtaagcatgcagttttacgtggtcgggagaatagataaaggtatccttcagtgcttggttctgtttcagactatctatccacggttttagataggggtaagtcttaaacatatattgccaggaactttccaaattctttcctctgttttcagggcgtaaggaatagttcagcatatattgactgcctccaagtaggactataataagcagaacgaatatactactcgttccaataatcattttttttcttttcataccttaactatttgttccatatatcccatgcaccaaaggcttgcaataagagcatttctaaaccgtttttggtaattgcccctttgtctgccccctttttcataaaaagagtagtgtcaggattatataacaaatcataaagcaaatggttgggtgtgagatattggtatggaatattgggatattcatcggcacggggatacatacctacaggagtacagttgacaactactttatactcatccatgatttcgggagtgagctgatcgtaagtcagcatttcttcacgcaggttccgtgatacgaatttgcattccaaacctaattttttcagtccgtaagcaatcgctttcgaggcccctcctgttcctaggatcagagcttttttgtgctggggttccagcaagggttcgatagattgagtgaagccaatcacatcggaattatagcctatcagcctggtcttacctttttggcggacaattttgattacattgacggctccgatggctgccgcatctttatccagttcgtccaaataagagatgacttgttctttataaggtatagtgacattgagccctactaaatcaggattagccaatagcacagaaggcagttctttgatggatgggatttcgaagtttacatattcggcatcaatgttttccgaatgaaacttttcattgaaaaagttctttgagaacgagtgtcctaacggataacctatcaaaccatattttttcataaaactctatactttaaattatttcgttgctaaataaagcgtacagatacctagtgtcaaccgcttgaaactcacctgattgaatccggctttacggataatgtctgtcattatttcgccttgtggaaaggctttgatggactgcggcaggtaagtgtaggcactacggtctttagagagtagcttgcccaaagtggggatgactattttagaatagacagcatatagctgtttcatggggaaccagtcgggttcggagagttccaaaatgactagttttccgttgtctttcagtacgcggtgcatttcgcggagtcctttgtcaaggtcttcgaaattgcgtacaccgaatgctacggtaatagcgtcaaagcgtttgtcgggaaaggtgagtgctgtacagtcttccttagcgaaagagatgcggctgtccagtccggcggcttttactttttcacgtcccacattcatcatgccttcggatatatcggtacctatcagctcttgggggtgaagtgtctgacaggcttgaatggcaaaatcgcccgttccggtggctacatccattatatgttgcgggtgaaaaggttccagccagttgatggctttgcggcgccagcttttgtcaatgttccatgaaagggcatgattcaactggtcgtaagcaggggcaatgttgtcgaacattttctctacttggacgcttttcttttcgtcagcgttgtaaggcttgattttttcttgtgggtagttcatgtttgattaaaattgaaaattaaagattaaaaggagaggatggaggatagattcctgtacctgtcttttaatctttaatttttcatttttatttatttcaagtattcggttacgttcttttctatacgtgtggcgatattttcagtgtctgctttcacaaatttctcaccggtgatgtgctcgaacagttccatatagcgctcgctgatagaatttacgatttccggagtcatttcgggaacttgttgtccttctttgccttggaaaccattttccatcaaccattcgcgtacgaattctttagaaagttgtttttgaggttcgccttttgcaaagcgttcttcataaccttccaagtagaaataacggcttgaatccggagtgtggatctcatccatcagataaatagtgccgttgtgtttaccgaattcgtatttggtatctaccaggatcagtccgcgttttgcagcgatttcagtaccgcgtttgaacagagccaatgtatacttttccaatatttcgtattcttcgggagtggccagaccttgtttcagaatttcttccttagagatgtcttcatcatgcaggcccatttcggctttagtggttggagtaatgattggttcgggaaatttctggttttctttcattccttcgggaagttttacaccacagatttcacgaacgccgtttttgtaagcacgccatgcgctaccgcacaggtaaccacggacaatcatttccacaggaaaaccttgacacataactcctacggtaaccataggatctggagtcgccattttccagttggggcagatgtcggtagttgcatccagaaatttggctgcaatctggttcagcatttgtcctttgtagggaataccttcaggcagaactacgtcgaatgcggagatacggtcggtagctaccattactaacttttcgtcattgatgttgtatacatcacgcactttgccgtggtacacacttttctgtcccggaaagttaaagtctgttcttgttaatgctttactcatgtctttatttataattaaaatcaataaattcgttttatgttttcagatttttcacttcgttcagaatgacatgaatgaagggttttctgtttttcttcaaacttctcgtatgcttccacaatgcgggtaaccagtttgtgccgtacaatgtccttcttgttgagttcgatgaaactgattcctttcacgcctttcagaatttttagtgcctgtatcaaccccgaagtttgtgaagatggtaagtctatctgtgtcatgtcacctgttacaatcattttggtgttcatccccatacgggtgaggaacatcttaatttgctgggtggtggtattttgagcctcgtccaatatcactacagcatcattcaaggtacgtccgcgcataaatgccaatggggctatttgaatcacattcaattccatatattcttttagcttggcggcgggaatcatatcttgtaatgcgtcatacagtggttgtagataagggtcaatcttatctttcatatcaccgggtaaaaatccgagtttttctcctgcctccacagccggacggctcaaaataatttttttgatttctttgtttttcagggaacggacagcaagggcaatagcagtgtatgtctttcctgaacctgcgggaccgatagcgaacagcatatcgttcttttcgtattcttgtaccagcttcaactggttctcactacggggaacgatcggttttcctgttacactgaatacaatagtatcccctgtattctctatttggggtgaacgacctttcactatgtctaaaatcacttcttctttcagtgagttatactgggcgcaatgcttttccaatgccaatatattctcttcaaaagcacacatttcctcttcgtctcccaatactttgatgacatttccacgtgccacaatttttaatttgggatacaaagcttgtatcattttcatattgacgttgtttacgccataaaatatcacaggatcaatatcctctaaaactatatgtttttctatcatttaactagtttaggtactttatgtacttgtttatagggtgcaaatttaatgaaaggttttcattgttcttattttccgggcaatttatttgcataagctttttcagaaaaaggattttaatctatctttgcgaggaatttgaaaagatagttagattatgaattgtatgaaaggtgcatgttgcacgctattgtcacttttgttttccttgacagtttcttccggttgcaaggaaaaagatatgtccatgaagatgaacgagcctcataatataaaaggtgtaattagctataaacgtagtttcggtgatttgaatgatactcatctcagtgtggcgaagaaaataggaattcgtccgttggcttctcgttcggaagcagaggggctgggtggcaaattggttcagataaaaccctgtgagcgttatgccatggattcgctgacccactccattccttttctgattccgcaggctagtgcgttattggatacaataggagccaattttttggattcattgagttgcaaaggattgaatcctaatcaaatcattgttacttctgtacttcgtacggcagatgatgtgaaacgtcttcgtcgtcgcaatggaaatgcttctgccaattcagctcatgcttttgggacaactttcgatgtcagttaccgtcggttttgtaaagtggaagacccggatggacgtcctatgcaggatgttagtccggatacgctgaagttggtattggccgaggtactccgtgatcttcggaaatcggacaaatgctatattaaatatgagttgaaacagggatgttttcatataacagcccgctgatttattgaattttcacttggtcggaggctttacgatgcggtatttcatatatttggcttatgatggaacgaattatcacggttggcagattcagcccaatggtgacagtgtacaggaaacattaatgcgtgctctttctacttttctccgtcaagaaatagaggtagtgggagcgggacgtactgatgccggtgtgcatgcgcgtctcatgatcgcgcattttgattatgaccgggagttggattgtgttcagataacggagaaattgaatcgcttgcttcctcccgatatagcggtttacgctgtaaagcgggtgaaggatgatgcgcatgcccgttttgacgcgacttatcgtacttataagtattatgtgactacccggaaagatccgtttaaccgtcactatgcctggaggctttttaattcattggattttgagaaaatgaatgaggctgcccgtgtattgtttgattatactgattttaccagtttcagtaaattgcatactgatgtgaagacgaataattgccggattatgcatgctgaatggacgcaggtgagcgggacagaatgggtatttactattaaagctgaccgttttttacggaatatggtaagggctgtggtaggtacgttggtagaagtgggacgtggtaaaatgactgtggatgagttcaggaaagtgatagaggataaagatcgttgtagtgccgggagttctgttccgggacatgccttgtttttggtagatgtgggatatccggaagaactgtttattgtttctccgtcagatatttccaatatctgacaggcatatcttgccggtgttttctgggattccaacgttctttgatgcaaatggacttgaaatatgttttccaaagtttctgaaacaatttctcatcattgtccatcaatgtttcatttagcattcctgtgaccagatgcgcttggcgggggtcttcaaatgttacttcttccatctccgtcagattatagtaatatccatattgtcgcttcacatcataaatgagccaacgctggtcggcaaaccggtctttgaaatgatccacagccagtggcagtgcgttgaattgaggctctacggctgcaaagaaagttccgtccgcagctttttggaaacggacgaactgcatgaggtgtactcgttctccatctactcttttatagattttcgcaagctccagcacatcaggatcggcaaagttggtttcgatggaatgaggagagtttatggccttccggatatagcggaaaagcatttcgtccacctttggtaattctgataaccagcagcaggtcaggcagaacagggcatgcttggagatttttttctgtaatccgcgccacactcgtccggctttctcttcatcagtggctatgtgtatggcttcatcataaaataagggtagcggctcgccttccatcaagagcgagtctggaaaggttttgcggaagtaggcatcgaaaatgcaagtcagcaagccttcaaatgtatggtcatagataaacagaatcattcgttatcagtgaagtttagtattaattggcgttcgtccactttctttttgggtttgggtactaacagtctgcgtactcctgtcggggtcagttcattaacagttcgggtggggagttcgttgcaggttatgaagtattgcgcttttttcatcactacacctatttttttcagttcatagaatcccagtttggagaagcggcgtgatgcgatgatttgtcttgccgatttgattccgatgcccggtactctgagaatcatttcgtaatctgcctgatttatatctatcggaaatagttcgggatgccgtaatgcccaacctagtttgggatcgatttccaaatccaggtcgggataggagtcatctactatttcttctactttaaattgatagaaacgtaacagccagtcggcctgatacaaacggttctcccgtaccaatggcggctgtttcagtgccggaagtcgtttgtcgtatgtatttacggatatatatcctgagtagtaaacgcgcctcatggtggggtgttggtagagtgaagaagaaagataaaggatgtctttgtctgattcggttgtggcaccgacaatcatctgcgtgctttgtccggcaggaacgaagcgtggaacatggcggaattttttccggtcttccttattggtaagtactccctgctggatatagcgcatgggctggtacacacttttgtgatctttttcgggagccagtaatttcagattctcttctttgggaatttctatgtttacactgaggcggtcagcgtagagtccggcttcattaactagttcgcgactggctccggggatgcttttcaggtgaatatatccgttgaatttgtgtactaaccgcaggtctttggcaacacgtaccaacctttccatggtgtaatccggattgcgtacaacgccggagctgaggaaaagcccttctatatagttgcgccggtagaattcgatggtgaggtctaccagttcgcttaccgaaagtgtggcacggggaatgtcattgcttcttctattgatacaataggcacagtcatatatgcaataattggtcagcataattttcagcaaggatatgcaacgaccgtcctcggcgaagctgtggcatattccccagccgcctacggtgtttcccaatgtgcctgattggttacggcgcacagtcccactactggagcaggaaacatcatatttggcagattctgctagtactttcaatttggcaaggacattctcattcatttaatcagaatatttctgccaaaaatacagatagtctttggaatgggcaaacggtttggcattttctccgttaatttttaacttctttgttggattatactgttccttttttctaattacaatataagcccgcttgctttaagcaggtgtgtattggtggtgactataattcttttaacttctttgtggagaatatatggggtattggaacgtggatgaactctgtatgaattccatcgctttttttatgttaaaatgctacttaaacattagtttatgtaatataaattaaggcggtttgcaaattatttgttaatttcgcacttaatttttaatgtttaatataaaaaaatatttatggagtggtttaagaaaaaaatgagagtctttctttttgtctgtttgttattccctttttatagttatgcggcaaagatttctttgtctataagtggtaaaatagaagatcattcagcaatgctttattttcctgacgggagagaacttcctatttcaatagatgcttcaggaaagggagaattggtagtcgatgttacggagcctgtttatgtggcattaggttatcattatataagtcgtactttgttgcttacacctgatacagatatacaaatttcttttgaaaataaaaaatttggagaacgtgtagccattacaggcacaggttcacaagtaaatatctatttgaataacggacgtttgaaagcagcagaaattgatgatatggcattaggagaaaaagcgttctttttgaaaatggatagtattttgaatgtaaatctgcaagagttggatcatgccggattatcagaggaaattaatgaaatggagaaaatacgtttgaaatattttacttgtgctacattgccttcttatccttatttccatatgcgtatagctaaggattctacttatgaagcttctttagaatattggagtaagttacaggagttgatagttatggatgcttctttgttgcgatatgacgaattccgttcatttttggttgaggcggtaagcagagtggcaagaaaacaatacccggaatcaaagtctttggatgcggtagtccgatatgtggaatcggaagtgaaggagcctagtattgcagagttcttaataaataagaatgtatatgcttatgtagagagatatggacttgattctgctgatgcttattgtgctgtgttcgatcggtatgtaaaatcaccgctattggtgaagaattttgagacattgtgcaatcgttggcgcaaattgtcggtaggagctctttctccaaattttaactgtacggatttgtctggtaaaaaagtttctctttctgattttaagggaaagtatgtatatatagatatttgggctacttggtgtggtccttgccaacgtgaaattccacatttgcaaaagttagaagaaaaataccatggaaaagatatttattttgttagtatctcatgtgataataacaaaaaagcatgggaaaatagagtgagggctggtttaaagggtattcagttgcattttgtaaatggagatacatttatgaatgactacatgataaaggggattccccgttttattcttttagataaggaaggaaaaattatatcggtggatatgagtcgtccttctgatcccaaaacaatagctaaattagatgaattacttaactgacttttatattgataaatttttttaattttatgagtgaagaatcagtaaactcaagaaggtgcaaagggggaaatctgtttttttcaagaattcttttttgtatttgtttgtgtggaccggtagcttatgcgttggcagaggaaagtactgtcgtttcagaaatacggcagaatgaaaaaaaatctatttcgggagtggttacagatactaatgatgaaccgttgattggagcgactgtattggtaaaaggaactcagaatggtaccgtaacagatgtggatggacgtttccatctgaaggtaaacagtggggaaacacttgtggtttcatatattggtatgaaatcaaaagaagtggcggttgtggatggaaagaaagagctttttattcggttggatgcggacactgaaatgttggatgaagtgttggttactggatatcagactttgtcgaaagaacgttctacgggtgcgttttctaaagtttctactgaaaagttagagttgaaacgtatggataacttgtcttctatgcttgagggacaagtggctggatatgtgaatggacagattcgtggtgtcacaaccatgaatgctgtcgcgaatccgatggtcgtgattgatggatttcctgtagaaaatacaacattagacagaatagggcagacaactgaaaatatgcctgatttaaatccggaagatattgaaagcgtaacagtgctgaaagatgctgctgctgcttctatctacggtgcgcgagctgctaatggcgtgattgtgattactacgaaaaaggctaaagaaggtaaagcggaagtaagtttttcttctacctttacagtgcacccttattcttattataaaaaaaatcggactaatgcggctgatgttattgctatggaacgtgaatgggcgactatggcattgagtacgcctgaggctgcggagatgcaggctgccgatttgcgtgaaaacggaccatatcctagtttgggagttaatactttgttagatatgtacactgggaaaatcagtatggctgagggagataaaattctgaatcagttggcttcctacggttatcaatattatgatcaggcagaaaaatatggtaagcgtaaccctttttaccagcagtataatttgagggtaggtaaaacaacagagcgtaattcttttaatttctctactacttattgggataatgattatgaggatataaatcatagtgattggaaattaggtatcaatattactaattcattacagctaaccaattggttgcattttgatacaggcgtttatctgaaatatggcaaagagaagaaccagtcatatgatttgtttgatccgggcttttctgtcatgccttatgatccgttggtcaatgcagatggaagttattttgtggcaccttcacaaagtgacaagtcacgtcgtgatttagtggatcaatatgggctgtattcagaagatctcgtgccgatggatgagttgaattatgctcttaatacaaccaaaacttttgaaacccgcgcttatgctaagttgaagtttgatttgacttcttggttgaattacaatgtgatgttccaatatgaaacaagtgattcggattatgaatcattgggtgagaaagagtcaaattttatgcgtaagcgtattaatgattttaccagcaaatcaccgaatggcagttctttggtatataatctgccgaatggagattcgtttcatacgttgaagaacagcaaacatagttataacttccgtcaacagttgagtcttgataaaacatttgatgaaaagcataatttagtatggatattaggacaggaagtgcgccattcattgattaattttgatgaaaatacggtatacggatatgatccggagcttaaaacatggcaaaattataatatgaaagatttggcttatttttcgggcttgttaggatctgctcagttagatcagaatagtattgcttcgtctcgtgaattgcttaatcgttttgtttccttctattcgaatgcatcgtatacgtatgatgataaatatgtactttctggaagtattcgttgggatcgttcgaacttgtggggaactaattcgaaataccagaataaacctttatggtcagtcgggggaagttggaatatctataaagagaaattctttcaagcggattttgtagacatgttgaaattacgcgcttcatacggtattggtggtaatattgggcgtaatacagctccctatctgatagcttcctattatgattccagccttgtggatggtatggcagggtctgtgaatactcctcccaataaggatatccgttgggaaaagacaacgactgtgaatgtaggtgtagattttgctttgttccgtcatcgtctgtcgggaacaatagagtattataataaatatagtgttgatctacttgctgctataaatggtagtcctacacaagggtttggctatacaacgttgatgacgaataatggaaaaatggtaaaccggggagtggaaatcactttgagcggagagattatccgtcagaaggactttagttggaacgcttcattgttatatgcatttaatcgtaataaagtaaaacacatcagtgtgcaaccaagtttgtgggatagccgtataagtatgcctaccagttatcctatggttggaaaaccattatatggtatttatgcgtataagtgggctggattgaatgagaatggtgatccacaggtatatgatgcggaaaataatgtcacttcaggtcctgcacgtgattatcatgcattggtttattgtggtacgactgttcctatacataatgcttcgttaaccaatgtattacgttataaaggttttgaattttcagcaatgctgatattggatgcaggtcacaagttgcggtcaagcaatattccaagcattaacatgtcgaacggacgtattacatctactgctaagggtatagtggaccgttggactcagcctggggatgtaacggacgtaccacgtctgcttttctctaatgatacggagaattttaatacacaccgtacggaattatatcgttattcggatttgtttgtgtatgatgcatcaaatattcgtttgagtaatatttcattggcgtacagagttccggcccattggtgcaagaaaatttctctttccggcgctcgtcttcagttcaatgtagagaatgtagcaacatttgcttttgatagtaaagcgaattacgatttaggcggtaaagtgaaaccgaattatgtatggggattgtatttgaatttttaaagaatgaataatatgaaaaaacaaatgataaagataagcagtctgctttttgttatggtggctatgatgctttccgcttgtgatgattatttggatgatgtgccgaaagggcagaagattccgaagacatgggaagactataatgcttttatccgaaataatttttcctaccattttcttgatcccgatcagcttgcggtattagcaggagatatatttaaacttccttctgccgtaactagtccgtcgttaacacgtgccaattattacgcagatgaatctgtaaatcgaatagacttaatgacaggcaatgataagaacccttattttaatgcttatgagggactttttgcgtggaatctaatcgtagaggatgtaccggatgcgacagaatgtacggaggttcagcgccgtcagttaatagctcagggacgtgttcttagagccatgcattatttttatttggctaatttttatgctgaccagtatgatgaggctactaaggataaactgtcagttcctttgataacttcggcttctgtggaggctccgtcgccgcaggtaactttgcaaacaatgtatgagtttatgcttgatgatttgaataaggcggttgaagatctgcctgtacatagtgagtcgattcttcatcctaatcgggcacttggatatggtatgttggctcgagtgtatttgtctatgggggattatgacaatgctttgaagaacgcttcattggcattggagcaaaatgaccagctttttaactggatagatctttatgaggcggataaggagcgctatgatgatcccaagaattatacatcaggggtagccggtaatcctgaaacagataatgtagagaattatatttattgttatggatcttccacttcaggttggactggcttgaataacacaagctacgctatttctcctgaacgggcggctcgttttgaaaagggggatactcgtctgctgacccattggaaatccagagtgtcatcttccggtattccttattatgcgggtatctatgctttggaaatgaataaaggaggtatgcgttcacctgaaatgtattatataaaggccgaatgtttggctcgtaaagggggagaagctaatattagagaagcaatggaactggtgaataaggtgagaaaaacacgtattcttcttgagttttatcaagattggactgctgcaacaacgaaagaagcagtggaaaaaataataagagataaagagagtgaatatatccagactcaggttatatattgtgattatagacgtttgaataaggatccggagtatgcccgtacttttccacgcactattgaaggaaaagagtatattctaaagtctgattcgcatttatggattatgccttttccgcgtgaagccgtatctaatcctggaaatggaacgattacacagaatgtggaaaagtaataaagcgataattttgcgatagaatttatattatcgataggagtattctgaaaagattaagaaatatccggatatcctatagagagaaacaaaaagggcggaacaaaaaatccgcccttttctcgttttattatttttcaaattggattagtggcaatgtccgcatccacagttgttttcatcactacaaccatcaccgcatccacctccgcagtcaccacaaccacagccgcatccttctccactcatcatttttaccatttcctgaatttcttcattagtggctgtgcgggattctactacttcaccttcaaaagtgagatctttacctgcatgaggatggtttaaatctacagtaacagtgtcattggttacttcgcttacggtagcgtagaagtgatggccttcattgtcctgtaagggaatgacagcccccgggaagatacgttcttcatcaaaaacaccatcaatggtgaacatatctttagatacagtgcgcacaccttcgggcatatattctccgtaggcttctgcggtaggaatgacaaattcaaatttatcacccttcttcaaggctgttatttctgtttcaaagcgttccagtgtggttcctaagccggatatgaactggaaaggatgttctacagttgcttcttctaccaatgttttctggccgtcttgcattacataaagtttgtatgctacggtgatgtacttattttccatgttttcttattataataatgtaatataaactacttacgtaagttttccgttggcaaagatacgaattaattccccttaatcctttgttattacgtttatattatataaatttgttattatgatactataaatgcattttcggtggcgtttaatccttgatataaatcaattaactgctcgttttgatagatgtttgctttaattaacagatatatgacaacatgttataaagcatgttgttatatttgcaacgtaaagagaaagagataacgagattgtttttaaaaggtattatttagttcttaggtactaagtaaattgtttttaggtttaacaaattaaaattttaggtattatgaaacgtttagtattgttggttgtagtggcattaggaatgtcagctacaagttttgcaggagaaaaagtagaaggtaaagattggaaggtagatgttaacgtcgcaaagttgagcaaatatttgaatctggatgcacgtcagatggaggaggttgctaatatttctgattattttgctgacaaagtgcaaagcgcaagctacgcaaaagaagctaaacaaggtaaaaaattgcgtgaagccgtatatggaaacttcaaactgatgaaacgtacattgacaaatgagcagtacaagaagtatgtgcagttgttgaatgtcacattgaaaaacaaagggttggattcctatatggaagatgcggcgaataaataaatttataaagtgaaataaatgaatagaaaagagagtgcattggtttgtattctcttttttatttatccgtcggaagatatagtgtatatttgtgataaaatgattgtttaaagcccgatttagttacgaatgataatttataagaaaaaaaatcttcattttatttgtttgttacaaaaaacgctttacctttgcagtcgttaaagaaacaaagaaaacagatatatgaatattactactctaaataacctggcagtcctgcatattattcgcgtcgtggtggtggtcacactgggagcgtgagaaaggttgtgtatgtgtagttgtacatataaagaaataattgaaagcctttctcacatggtgaggaaggctttttcaataagtataggacgttatagatttagaataagatgaagaatcagttacgcagttcgtttagcacacagggtcgccgtatggcaggagcgagagctttatgggtagctaacggcatgaaaaaagaaatgatgggcaagcccattatagccatagtaaattcgtttacacagtttgttccgggacatacccatctgcatgaaataggtcagcaagtgaaagccgagatcgaaaaactgggatgttttgcagcagagttcaatacaattgccattgatgacggaatagctatgggacacgatggtatgctatattcactgcccagtcgtgatatcattgccgacagcgtggaatatatggtgaatgctcataaggcggatgcaatggtgtgtatcagtaattgtgacaaaatcactccgggtatgctgatggctgccatgcggctgaacataccgactgtttttgtatcgggtggtcctatggaggcaggagaatggaataaccagcatcttgatttgatagacgccatgattaaatctgctgatgcatcggtcagcgatgaggatgtggctcaaatagaagataatgcgtgtcccggctgtggatgctgttcaggtatgtttacggctaattccatgaattgtcttaatgaggctattggtctgggacttccgggtaatggcactattttggcaactcatgccaaccgtactcagttgtttaaagatgcggctgctctgatagtgaagaatgcttataaatactatgaggaaggagatgacagcgtgttgccacgcagcattgctactcgtgatgcttttctgaatgccatgacattggatattgcaatgggtggttccaccaatactgtgctccatcttttagctatcgcccacgaggcggaagtagatttcaagatggatgatattgatatgctttcacgccatgtgccttgtttgtgtaaagtagctccgaacacacagaaatatcatatccaggatgtgaaccgtgccggcggtatccttaatatattgggagaattatccaagggtggtttgctgaaaaccgatgtgaaacgagtggacggtctgacattggcggaagctgtcgaaaaatataatatatgtaagaaggaagtggatactgaagcaaaacgtatctattcaagtgctccgggaaacaaattcaatataaagctgggttctcagaatgctgtttataaagaactggatacagatcgtgccaatggttgtatccgtgatttgcaacatgcttatagtaaggacggaggtttggccgttttgaaagggaacattgcacaggatggttgcgtagtgaaaacagccggagtggatgaaagtatttggaaattctcgggacctgccaaggtgttcgattcgcaggatgctgcttgtgaaggtattctaggaggaaaggtagtcagcggagatgttgttgttatcactcatgaaggtccgaaaggtggtcccggtatgcaggaaatgctttatcctacttcttatatcaaatccaagcatttaggaaaagaatgtgctctgattaccgacggacgttttagtggaggaacctcgggattaagcatcgggcatatttctcccgaagctgcagcgggtggtaatatcggaaaaatagtggatggtgatataattgaaatcgatattccgaaccgcagtatcaatgtgaaactgagcgacgaagaattggccgcccgaccgatggcaccggtgacccgcgaccgtaaagttcctaaaagcttgaaggcatacgctagtatggtaagttctgcagataaaggaggagtgagaatcattgactaaattagaaattaaaaattgagaataaaaaacagtttcgttgtcatcggccagttgtccggcatcgtatttttttgaatctcaattctcaactaaacaattatggcaaaagaaaagataacaggagcagaggcgatgatgcgttctttggagtatcaaggagtaaaaactcttttcggatatcccggaggttctatcatgcctacttttgatgctttatatcatcataaagatacattgaaccatatattggtccgtcatgaacagggagctgcccatgcagcacagggatttgcccgcgtatccggggaggttggtgtctgtttggtgactagcggacccggtgcgacaaataccatcaccggcattgccgatgctatgattgacagcacgcctattgtggtgattgccggacaggtaggagcttcttttttgggtacggatgcttttcaggaagtagatctggtgggtatcactcagcctattaccaaatggagttaccaaattcgccgtgcggaagatgtagcttgggctgtagcccgtgctttctatatagccaaaagcggacgtcccggtcctgttgttctggactttgccaagaatgcacaagtggagatggtggattatgaaccgatgaagcttgattttatccgtagttatgatccggaacctaatcctgataaggaatctcttcaggaggctgccgaattgataaacaatgcccaaaggccattagtgttggtagggcagggggtagagttgggtaatgcacaagatgagttacgtgcattcatagaaaaagccgatatgccttgtggctgtactttgctgggactttcggctataccgacttcgcatcctttaaataaaggaatgttaggtatgcatggaaatctggggcccaatgtcaagactaatgaatgtgatgtgttgattgccgtaggtatgcgctttgacgaccgtgtaaccggaaaattagatacatatgctaaacaggcaaaggtgattcatttggatattgaccattctgaaatagacaagaatgtaaaagtggatgtacccgtattaggtaattgtaaacatacgctagctatgctgacgcaacttatccgggagaataaacattccgaatggattgatagctttgctgaatatgaaaagacggaatatgaacatgttatcagtaaagaaattcatcctgttgacggggcgttgaatatgggtgaagtggtgcgtgcggtgagtgaggcttcgaataatgaggccgtactggtgacagatgtgggacagaaccaaatgatggctgctcgttattttaaatacagtaagaaccgtagcattgtaacttcgggtggattgggaacaatgggattcggtcttcccgctgctataggcgctactttcggttgcccggatcgtactgtatgcgtatttatgggtgatggcggtttgcagatgaatattcaagaattgggaactatcatggagcaaaaagcgccggtaaagattattttgttgaacaataactatttgggtaatgttcgtcagtggcaagctatgtttttcggtcatcgttattcatttactccgatgttgaatccggattacatgaagattgccgaggcatacgagattcctgcccgtcgtgtcatgaagcgcgaggaattgcaggatgctatccatgagatgctggctaatgacgggccgttcctgttggaggcttgtgtgatagaagagggaaatgtattgccgatgacacctccgggaagctcggtgaatcagatgttactggaatgctaatttaataattatggataagacattatatacattaatcgttcattcagaaaatatcgccggtttgctgaaccagattacggctgtgtttactcgtcgccaaatcaatatcgaaagtcttaatgtttctgcgtcttccattaagggagtgcataaatatactattactgtctggactactcaggatgtgatagaaaaggtggtgaagcagattgagaagaaaatagatgttttgcaggcacattattttactgatagtgagatttatcagcatgagattgctttgtacaaggtttctactcctgaatttcaggagaatcctatggcatctaaagttatccgccgttatagtgcccgcattgtagaagtaaatccggttttctctattgttgaaaagaatggaatgagtgaggaaattactgctctttatgaggagttgcgcggattgggatgtgtgttgcagtttgtacgttcgggacgtgtggcgattactaccagttgtttcgagcgtgtgaacgaatatctgacccaacgcgaggaaaagtatcgccagcaaaaaacggaataatgatgagtgagaataaagtaggaacatacagatttgtggcagaaccctttcactgtgatttcagtggaaagttgactatgagtgtgctgggtaaccatttgctgaattgtgccggctttcatgctgccgaccggggatttggaattgctacactcaatgagaatcattatacatgggtactttcccgtttagctgtagagttagagaatatgccttgtcaatatgagggattcagtattcagacatgggtggagaacgtgtatcgcctttttacagaccgtaattttgcaattttggataaggaaggaaaagctgtcggatacgcccgttccgtatgggcgatgatcagtatggaaactcgcaaaccagctgacttgcttacgcttcacggaggtagtatcactgattatgtatgcgataaggaatgtcctataagcaagcccggtcgtattaaggtgacagagaaaactccggtttctgaataccagaccagatatagcgatattgatatcaatggtcatgtgaacagtattaagtatatagaacatattctcgacctgtttcctatagaattttttaaggagaaacggattaaacgttttgagatggcttatgtagctgaaagttattatggtgatatattgagtttctaccgcgaggaagtgggggagaaagaatatgatatagaggtgaagaagaatggcacagatgttgtcgttcgcagtaaggtgatatttatttagaatctaatttttaatttttaatttataatttaaaatggcacaattgaattttggcggcgttacagaaactgtagttatccgcgatgaatttcctttggaaaaagcacgtgaagtattgaaagatgaaacaatcgctgtgatcgggtatggtgtgcagggaccggggcagtctttgaatctccgggacaatggtttcaatgtaatcgttggtcagcgtccgggaaaaacatatgaaaaagcagttgctgacggatgggttccgggtgaaactctgtttggtattgaagaggcttgtcagaaagcgactatcgtaatgtgtctgttatctgatgcagctgttatgtctgtatggccgactatcaaaccttgcttgactcaaggcaaggcactttatttctctcatggctttgctattacttggagtgaccgtacaggggtagttcctcctgctgatattgatgtgatcatggtagctcctaaagggtcgggtacttcactgcgtaccatgttcttggaaggtcgtggtttgaactcttcatacgctatctatcaggatgtaaccggcaaggcttatgaacgtactattgcattgggtattggtatcggttcaggctatttgttcgaaactactttccagcgtgaagcaacttctgacttgactggtgaacgcggttctttaatgggggctatccaaggattgttgttggctcagtatgaagtattgcgtgaaaacggacatagcccttctgaagcgtttaatgaaactgtagaagaattaacccagtcattgatgcctttgtttgctaagaatggtatggactggatgtatgctaactgctctactactgctcagcgcggtgcattggattggatgactccgtttcatgatgctatcaaacctgtagttgaaaagttatatcacagtgtgaagactggcaacgaggctcagatttctatcgattctaactctaaacccgattatcgtgaaaaattggaagaagaattgaaagcattgcgtgaaagcgaaatgtggcagacggctgtaaccgtacgtaaacttcgtcctgaaaataattaatagttagtatttagtatagaaagcgggggtgcgatgaggcatctccgctttcttttatatatattaatgttagtggtattgtttatatcatgtgtagtcgctaattttgtgaaaacttgacttagacatgaataatagattatcacttttattaatagggtgcatatttccctttctatctttttatgcacaaaagaatatgaatcttccaccatattatcccacagtaaaaggtattacggattatgctgtgtggcagcttgtatatccggattctttattaaaggcggatattgcaggtgaagcagtgtgtacactccgcattgatagtttgggtattgtccgtagtaaatatattgaagccactcatcctttgtttgccaaggcggccgaagatgtgattgaggggatgcgtgaatggcagcctgcaaagaaagcgggtagagatatagatagtactgtagtctttcatattccttttaatcctgatatttacagtgaccgtatttggcggcagcagcaagttctggaatcttgcaggggacaatttgtcgattccatgcctgtctttccagatgatattcgtagtcttgttatgggaaatatgggttggcctgatgataaagtggataaagccgttgctatttgccgttttacggtgaatgaaaacggggagattatgaatatccgtgtgataaaaggcactcatccggcttttgataaagaggctatacgtattctttctaattttccccggctgattcctgccatgaaaaacagcaaacctgtgccatatgattattttttgactatgcgtttttggaaagaggatctggaacattatttattgtatagggaatgtgcacaggaagatttggaaaagaccacttgggagccttatagatactcttcttatcccggtggtactgttgctttgacgcaatttataaattctcatctgaaaataactcccgaaatgaaagctacgggaaagcagggacgggtgatttatagtttcaatgtggatatagatggttcaatgaaagattttcggctggtgagaggacttgatccattaatggatgccgaagcattgcgggtacttcaattagtgaatgaaaaatggagtacggggtattatttcaattcaaagaaatggtatcgggagttttatgtgaatcaattcaccattcccattatttttagttggtagcttatacatattgctactttggacttgagatttcgatgttttgacagtttttggagtacacctgtaacattaaggaggattaccgttcttgaaggatcattttgttcttcggtcaactttcggaagtatctctgacctgtcagcttttcgatacaggaacttcgagcatgtatgccctcatgctctcattgtgtgtataacaggctaataaacgtgagttcgaaataaaatcaaaaaatagcaagttgtccgtcattgacaaactttacgtcaatggcgggctttttttcaaaaaagcagtatgccgcgatagccgacaaggagttggctataaagttactgaatgaacgatgtcttgagtgttcaatctgtgcgatgttcttcagttcgtcattgaccgtttcaatcaaggctctttttcttagcaaaatcttgtcggcaatactcatcagtgagttcctcatattatttttaactttagtaacaagttgtatgccattaaggaaaaggttttcaaacagagcctgacctatatatcccttgtctgcacatagttttcctttgatgttttccagaaacctaccctgtttcaacggttcccggtcatccacgtttccaggcgtgaacatgaaattgaggatttcacccttgtcattgattatcagatgcagcttgaatccgaagaaccatcccatagaacatcttccacgctcggcaagcccttcaaatgtcttatgaatcaagattctttggttacgacatacacataagggagtggaatcaacgaaactgatgccggtacaagttcccagcagtactcttttgatgaatatggtcatgggaagcaatacttccttctccagttccacaaaacggttataagaaacctgacgaggaaaaaggtgtttcagatgtttacagacatactccttgtagtaatgcttgaaacaacggaaaccaccggagtgaaacaggattagaataaccataatctctgcatcactcatacggttgggtttgttacgatgcatggtcttcatatccttaatcatatatttttcctgttgcaatgtaaattccttgcaaaaatcatcggccatacaataaatctctgtaactttagactctggaaacatagtggtaatcgtttaaatgttataattcagcactataaatttaatacttttatcgctatgtttctaattataagtgaaatatatttattcttatttcgaactcacgttaattataaattacttatgtgttgacggtaaaaatacttgctctcacttatactctcatgccctcactatgttttgaagtttctttttacataacatgcttgttgtcagttatgtatattttttacaggctgtttgtgtttgatgcaaagtaggacattttcaggcttttctatcgtaagaagtatgcatgagaagggtttctacgaaatgaggcttacgatggaatttccggcaggggtaaaaaagatcaagacgtttttaaaaaagctcttgttcttttttaaaaaggcggttatctttttttaaaagctcttgatcttttaaaaaaacgtcctgtcaccaacgacaggaagaatataaaaacaggctgtaccaatcatttgatacagcctgtttttatatttataagattatatactacagattagaagtacagataacggtcatctttcacttcagcttttttgtagaggtcattgatgaaactgctagcataacgtcctgccatattagacaagttgttttcttcgtttttagcatcaaattcttctgcacttttttctttgttataaacctgaatcatgtaaacacctgcattacccttgataggaccagttaacttgtttacttcagctttgcttgcataagcacctaaagctggttcgctggcgcgagttactgaaacatatgccggagcagagaaagtgatatgttttacagaatcgctaactgcatttgccatatttttcacttgggcaatgctgtttgcgcctttcatttcagctatcagtttttcagcttttttatctttgatgatttctgctttcagcatgtcggcaaccaagttgatattacgatatccggcaggattaatcttttcaagagcaactaccatcagatgatcgttctcaccacattcatacaatggagacacttcaccttctttggctgcaaaaatccatttcaacgcttcacgggttccttttacaccacccacacggtgttctgcgctacggaaatcagcacgttctaacaagcggtatccgctttcttctgcattggcaacaatcttatccattgtagtgttctgcgctacgaattggctgaaatcattgtatgccttgttgtatgtttctttgctgaattcaaccggacgtttaatcactgcaactttatatttatctttcatggcttttttatccaacacttgaagaataacgttagcttgtccgatctgaagattgcttaattctttaacattagaattaatcaatgtgttgatgtatttagcattgtcagcatctaatgcagcaccttcatagttgcgtgcagtcaaccaggttgcttcacctgtctgaccatatttttttgcgatatcagcaaagtcagctccatctttcagtgcattgaaaatactatcggctaaagttgcggttttagcagcatcttcagcatatacctgaatttgacgatattggattgaatcgggagcagtctgcttggcaataattttaaaagcattatatgaatcatctgcctgattatagtaaggaccatatacttcgttgatagttacagagtccaaacgagcaactacatcattaggatatacagtcttgttgattgcaatttcagaaaaaggaacaacagagccggtggaacggatgaatgtgttcatgtcggcagcggtacctagctggttggcatattcggttacttcatttaatacttctttgcgatcttcttcagatggagttaccaatacatcaatgtatttgatgttacgagtttcaaccggctgttcgaaagaactttttttcttgttatacagatctttgatttcgctgtttgaaaccgtgatagttgaatcgctgatagaagaataaggaattgcagccagtaaaacgtctgattgttcagtgcgtgatgtaaacgcatcttcagctgcaaccggatttgagatcaatgattttgcaatcaggttctgatatttttcagctaaagtagattggatcaaagtcttttcaataaaattccaaaaagctcccattttttgatagtattctacatattgtgcaggcattttgcttgcatccaggtgagcgtaatctaccaggaattttttcagcatatctttgtcgaaagcaccggtttgcggattgcggaacggagtttgcattaataaggggttagtaccctcctcaatgattgcttgaacttcagctttgctgacagtcagtcccaattttgcagcttctgctgcgattaattggttatttacgtaagattgccatacttggtctttcacttgagtcagttggtcgtcatttaatgcagaaacaccttgtgtcaatttaatgacttctgtgtattcgtctaccattttttgatactcttgtgctgtaagtgtttttccattcacttcacctacgtcttgtttaccctgatgtggttggagaaccttccatgcgtctccggcaatgaatgcgaagagggcaagtccgattacaacgaccaacagagggcctttacttctgattgtttgtaatgttgccatttaattttactatttttgtttattgtttttttatacttcatagatttagcgcacgaagatacaaaaaatgcagcttacaagctattttattgtgaaaaaaatctattattcggttactttcaactttactaattcaattttggttgctgttactttaattattttgaaatggaatttatcgaaagtgatctcttcatgtattttggggaagctttggtattggtgcaggatgagtccaccgatagtttggtaatcatcattttccggtaggccaagtgagaacaattcattggctttttctatttccagacgtccggaaaggatgtattcattgtcaccgacagatttggctatgtaagaagtcgtgtcatgctcatcttctatttcaccgaaaatttcttccactaaatcttctagcgccacgatgccggatgtacctccgaattcatcgactactacagctaaggatttcttttgctgcatgaatagtttcatcagcttatgcgctcccatcgtttcgggagcaataggtagttggcggacactcttagtccagtcggtctgttcacgaaacatttcagaagaatggatataacctataatattgtcaatgttttctttatagacaatgattttactgattccgctttcaatgaagcgggcttttagttcttctatgggagttccatattctatggcaacaatttcggttctaggtaccatacaatccctaattctgatattcgaaaaatctagtgcattttggaatatcttgacttcggtgtctatgtcttgttcattttgaacatcttgtatactgctttgaataaagtaatctagatcgactttggtaaaagctttttcattggcttctttatttgttttaatgcctataatgtaaagtaatatattggatattcccgaagcaaacttgctgatgggatagagcaagacatagcaaatgtaagtgggaactgcaaaaatattcagagtgaaattgggattaatcttaaataaggttttaggcaggaactctcctgtgaccaagatgattaatgtggaaataattgtttggatcagtactaataaaaagtggttgtctatcaatcctgccagcaagttttgttcaatgacttgtgccatcaatataccgtaaatgaccaaagcgatgttgttccctaccaacatggtagagataaaattgttcggattatgaaagaagatggaaagtatacgtgaatttatgctttggctgttacgatccatttcaaaacgtaatttattggatgaaacaaaggctatttccatgccggagaaaaaagcggaaaaagccattgtgataagaatttgtataataatacccataatagtgagtgaattagcgtatcgaatcagttctggtgctatttgcaacagcttttgtactgtctgctggtgctgtatcttctacagtgaaaatacctgtgttattataaatttgatattctgtcatttgctggttggattcaaatccataaccggtaatgattttgtcttcttgttcaatgcggataaatttgtcagaatagaccctttcctgtttttcatcccaaaagagcaggtctgtgtcaaatttgtcgcctctttggctgcggatatgcacattgcttctcaattcccaaagtttctttttctcgtagtaataggctgtatcggcttttatgctggcatcaatatggaatagggaatcaaacttttccagataaactcctttttcaaaagcccaataaggagggttctttttatcataaatttcccattcttctgtgataattttgtagcgggtaataccggaatcggatataagggtagtaacccccaatgttttcatgctaggcaatgaatctctttctgtaatggcttccgccagatttttttcgcctcctgagcatgctgggaataaaacaaacataacagttgcccaaatggcaactgttatgtttagaaatataaagtgtgattcttgttttttttcagacgacataattatctgatagttgttgtttcaccaatccatccaccgattgtaacagagtcacctttcttcaagctgaggaagaacaagtctgcgtctttaggagtatgggctgcataagtaccaattagtttatttgcttcttcagcaacactaggatctacactttttgctttctgtaatttgtcgataacagcaaaataagtacacttgttcaatgcggcttcatcactccagttagggcttgatgcatacatattagcaattaaaatgtaaggcttaccattgtttccatccaatgagattgacttcagcgcatattgttttgccttgctcaactgttttttgctgaataaaatagcagcggttttgtatgcatagtcggctttctttaatgggtcttgttctaagttgatagcctgatcaaaatagtcgatacatttgtccatatcacctttcttgtaatacatgtatccgcaacctacagcagtttcggcagtcggttcgatggcatgtgcggcttcagatgcagcaaagtaagcttcctgttctgtacagtttagcatctgcattacagaaataacttgcttcagataatccaaattagttttgttttgttcaactttcggagcatagatagcttgtaggttgtcgcaagtcgctacaccactgttaatgaaaaatgcatcgatattgtcttttgccactttcaataattttttgtcattttcctttgtagcagcttttaaagctccatcagcaactcctgatgcaaacaagtaatcctgaatgaattgttctttgtatgcttcatcactcttcattttacgggcagcagcatccatgaattcttgtaatacaaaatagtcggaattttctttttcaagttcaatggcttctttgaacatgttgtatgcttcattcatgtcctgtccacccattgtgaagtagtcatgtgccttcattccgataattgaaccctttgtagcatctcttttaaccaacttgttcaaatcgtccagatattggatacgctggtcgtgaactttcatcagttcattgaagtattgtttttgcttagctgcatctttttcaccggctattaaagcacgaagaatttttgcaccattagtataagtacttacttgagctttgggggcttctgtaaatacgctcatccaaggagtataggcgtccttgaaattgttagttttgacatactcagtgtaaatactgatatttttcaagcatcggatactgtcttcaccatgtccgaatcttgatccgtctgacgctccggtctgagcgaaagaagctgttgtacctaaggaaagaacgaacagcgctgttaccatcttcattttcatcgtatataaatttagttgttgttatttatttgcttctctccatttatcaatccactttccatttcatgaaccaacgttcattgaaagtgagcccgatattgattctcaaatagttctcttccattaatcctttaaatttaggactgactttaatgtattgtccggaaatgttcagcatagatttactttggaacatgggaagtccgaaacctacactgacgccatattcgcgtgtaccgtcttgaaaactggttgctcctgtgtccggatcagtatagcttaccttattataaggagttgaataataagctcccatacggtaacggatacgcttcagatagttgtggctgatataacttggtacgaattccgcaccaaaagctatttttgtgcggttattcatttccacactttctttgttgaacttgctccaagtcagatcggctgtattccatttttgtaaagtatagtcaaccccaatcgtcaggcggttgtcatatacataagtaagacctgcaccaaatgtatgtggcattttaaacgggtttggaatagtatcgccagtttgtgactgtacataaatggaaccattactttccgtacctgtctgatgatatttatatgcatctccgtgcaaggtatgtcccagtgtataaacggcacctacatttattgtgtttttcttgtttaacttataagtatactgtaaaccaaaatccaatttataatcactgatggaaaatttgtctaatttgatactacgtgtatctgtcgctccaatagctgtcatggattgatgggtaatgtctccataaagatatgaaaaatttgcaccaacagacaaattattaaatactttataacctaatcctacaaaaacctggtgaaagcctccgtcgccattataagattcgacccactttccgttattgtctacatcctcaaaatcatgtgttttggaaatgttgtaacctactgtagaaaatggaagaaaaccaactgtcattcccattttttgccatagacggaattgcatggccaaatagtcaaaacttgagtttttagcattggtttttacattaccatccttgaagttcgcattttgaagagtcattcctgcatcgaacaagaatgtcaatgaatcgatagctgtataagatgccggattagacgcgttgatttggtagccgtttcgcaaaccgtatgctattcctcccattgctttactgttaccaaaattttgatcagctaactgaccaaagccgtagcgtgtatagggagaatttgtgcttgtttgggctacggccagccctgtgactgtgagtaatattgacgcactaatcagtcttttataatttatcattatagcttaatattctgtttaaacctttcaatactaaaaatctatctgcaaagatgatactttttaattttgtatcaaaagaaaattcatctccgcccgttaaaaaaaccaaaagctccggataattcttttgaagatgggtgatatagccgctcatttcaaattccattccgcgaatgactcctgcccggatagccgtttctgtagattgtccatacatcggaacttctcctttagcgcttactttgggaagtttgtcggtgaatatgttcaatgccttgaaacgcatacgcattcctggagaaatattgcctccatgataggctccgtcagcgtcaataaaatcgtatgtgacacaggttcctgcgtcgataaccagcacatcgtgtccaggcttcagccagtttgctgcgaccacagctgctaaacggtccatgcccagtgtttgaggcgttttatataaattagtgacgggaacaggggtttcatgacttaattcgatgatgttaaaaggcaatctttccagttggtgccggatcgtattgcttagtgttatgacagaagctatgatacctcgtttcaacgggtatcgggagcaaagcatcgggaggcaatctaaagaatgattggagccacgaaatacttcaactaactcgcctttgtcgaatatagccaatttggctactgagtttcctatgtcgattattaaattcacaactttgctttttcggctgcaaagtaacgcaaaaaataaataggaatagcaataaaaaatggtatttgtgaggaattaattaatatttaggtgtacttttgcatcggtaaacagagaatggaatttatgaataaattaattatagcattgatattgttattctttttcttgggtcaatcggttagaggtcaggaagataatataaaggtaagtctgatgacttgtgctcccggtacggaaatatatgctttgttcgggcatacggcattgcgctatgaggataaggcacgtggagaggactgggtgtttaattatggtatgttcagctttaatactccccattttatctatcgttttgtcaaaggagaaactgattatgaattgggcgtaacccgttatccttattttgaaggcagttatgctatgcgtggttcctcggtttatcagcagacattgaatttgactatttcggaaaaacaggaactcagaagattgctggaagagaattatctgccggagaatagggtttaccgttataactttttctatgataattgcactacccgtgcgcgtgatgtaatagaaaggtgtattgaagggaaggttgtttattctgaaggaaaggaggggctctcttttcgggatattgtccatcaatatactaaaggacacaaatgggatgagctgggcattgatatgtgtttgggcagtgaagctgataagcctattgatgcgcgtaagcagatgttcgcccctttttatttgctggaagcggcaaaaaaagcgactatagtagtaggtgacagcgtgcgtcctttgattctgcatgaaaaaaaggtggtggatgcagaaccggagaatgttggtgacggttttccattgtcacccctggcgtgtgtctttattttaataggaattacttgttttgtaggatggttgcagtttaaaaccaggaaaataatctggatttgggatttgcttctttttggtgtacaagggttagcgggatgtgtcattactttcctggtctttttttctactcatcctacggtagggtccaattggcttatccttttattgaatcctatccctttactttaccttccggtcatggtttgtcgagctataaaaggtaaaaaagacctctatcatacaataaatgtagtgtatttaacactttttataatgataatgccgtttgtacagcaaaaattcaatgtaacggtattacctttggcactgtgtttgttgatatgttctgcaaaccacgttttattatattacagacaaaacaataaatgaaaggacgcatcttaacttctcttttgactgttatcgcattaacagggttgcaggcacagaacattcctgcggttcccaggttggtggtcggattgactattgaccagttgcggactgattatatagaggctttttcggctttatacggtgaacgtggtttcaagcggttgtggagagaaggacggatttatcggaatgccgaatatgactttattaatgtggataagtcatcagctgtagcggccatttattctggcactacaccttataccaacggaatcgtgggggataactggatggaccgcagtactctgcgagtccttaattgtgtggacgatgctgattttatgggtatttacacttccgagtccacttctccgcagaaaatgaaggtgtcgactttgacagatgagttggtaatagccacacaaggaatagctgaagtttattctatcgctcctacacgtgaaatggcggtgttggctgccggtcatgcttcgaaaggtgcattctggttgaatgatgaaacaggaaaatggagtggcagtacatattatggtacatttcctgcatgggtgactacttataatgaccgtgaaggattggatttccgtatcggcaatatgtcgtgggagccttatttgcctgtgactgtctataaatatttgactagcgagaacaaacaagttacgttcaagcataatttcgatgacgagcggaaaaataaataccgtaaattgaaaacaagcccttatgctaatgatgaggtaaaccgtttggttaatgcttgttttagtaatacttccattggaaaggatgctgttccggactttttgtcactggcatattatgccgggaattatgatcataaggctcctgcagaactcccgatggaaatgcaggatacctatgtacgtctggacaacagtattgctgaattattggaattgatagaccggaaagttggtttgaacaatactttattctttataacctctacaggatatgctgacgctgatcctgttgatcctcctcaatataaaataccgggtggagaattccatattgaacgttgttctgctctgttgaacctttatttggctgctatttacggtgaaggacaatgggtggaggcgcattttgagcagcaaatatacttgaatcataagctgatagagcagaaacaactgaatatatccgagatattaaatcgtgcggcagaatttttggtacagttcagcggagtgaaagatgtgtattcttcacaacgtttgcaattgggagcgtggactcctaccattgataaaataaagaattactataacccgatatgttccggagacttatggatagaagtcttaccaggctggactgtattccgtgaacattcgcttgatacgcaggtgcaacgctattcatatgcgtcggctccattgattttcattgggaacggaatgaaaccggaaataatccatgcgcctataaaaataggcaatatagcacccaccgtagcccattacatgcgcattcgtgctcctaatgcagccgttctggcaccaatgacagacatcagaaaataatattaaggagagaagtgcaaataaatcagcattttattgtaactttgcactttcaaaagtaatcaaattagaaaataataaaaacaaaaaatacaatgggatttaatgaatttattggcaaattgtttggaaataaggccactcgtgacatgaaagaaatcaagccatgggttgataaaataaaggctgtttatccggaaattgccaaattgagcaatgacgagcttcgtgcaaaaacagtagaattaaagaagtacatttctgattcggctgctgaggaacaaaagaagatagaagaattgaaaggtactatcgaaactacagaactggaagatcgtgagggcatcttcgcgcagatagacaaactggaaaaagaagtgctggaaaaatatgaaaaagcactggatgatgtacttccgcaggcttttgccattgtaaaagacactgcacgccgtttctctgaaaatccggaattggttgtaaccgctaccgattttgaccgtgaattggctgctcaaggaaaagattttgtgcgtattgaggacgataaggcgatttggcagaaccattggattgctggtggtaatgacatggtatggagcatggtgcattacgatgtgcagttattcggtggtgtagtgttacataaaggcaagattgccgaaatggctactggtgaaggtaagacgttggtagccactttgcctgtatttttgaatgcactgaccggtaatggcgtacatgtagttactgttaatgattacttgtcaaaacgtgactcggaatggatggggccattgtatcagttccatggattgagtgtggactgtattgataaacaccagcccaattctgatgcacgccgcagagcttatatggccgatatcactttcggtacgaataatgaattcggtttcgattacttgcgtgacaatatggctgtcagtccaaaagacttggtgcagcgtaaacataattatgctattgtcgatgaggtggactctgtattgattgacgatgctcgtactccgttgattatttccggtcctgttcctaaaggtgaggatcagttgtttgagcaactccgtcctttggtagagcgtctgtttgaagctcagaaaaagttggctacccaatatttggccgatgccaaacgcttgattgcatcggatgacaagaaagatcaggaagagggatttttggcattgttccgtagtcataaggcactgcccaaaaataagccgttaatcaagttcctaagtgaacaaggtattaaggcaggtatgctgaagaccgaggaaatttatatggaacagaataacaagcgtatgcctgaagccactgatccattgtatttcgtaattgatgaaaagcaaaacagcgtagatttgaccgacaaaggtattgacttgattacaggaaatgcggcagatcctactttattcgttttgcctgatattacttcccaattgtctgctttggaaaatgagacagatttgacagaagaagaaaaactggccaagaaagatgaactgatgacaaattacgctatcaagtctgaacgcgtacacactatcaaccagttgctgaaggcttatgccatgttcgaaaaggatgacgaatatgttgtaatcgacggacaggttaagattgttgacgaacagacaggacgtattatggaaggccgtcgttattctgacggtttacatcaggctattgaggccaaagaaggcgtgaaggtggaagctgctacccagacctttgctaccatcactttacagaactatttccgtatgtatcataaattgtcgggtatgaccggtacagcggaaacggaagcgggagaactttgggatatttataaattggatgtcgttgttattccgacgaatcgtcctattgcccgtaaagatatgaatgatcgcgtttataagacaaaacgtgagaagtataaagctgtcatcgaagagattgaagaaatggtaaaagaaggacgtcctgttctggtaggtaccacttcggtggaaatctctgaaatgttgagcaaaatgcttgcaatgcgcaagattgagcataatgtgttgaatgcgaaactgcatcaaagagaggcggatattgtggcacaggcaggtcagaagagtatcgtgactattgctaccaacatggcaggtcgtggtaccgacattaagctgagtccggaagtgaaagctgcgggcggtttggctattatcggtacggaacgtcatgaaagtcgccgcgtggaccgtcagttgcgtggtcgtgccggtcgtcaaggggacccgggctcatctgtgttctttgtatcattggaagatgatttgatgcgtttgttctcttcagatcgtattgccagtgtaatggataaacttggcttcaaagaaggtgagatgattgaacacaagatgatttcaaattccattgaacgtgctcagaagaaagtggaagaaaataactttggtattcgtaaacgcttgctggaatatgatgatgtgatgaacaaacagcgtgtggctgtttataccaaacgtcgtcatgccttgatgggtgagcgtatcggtatggatatcgtgaatatgatttgggatcgttgcgcttatgctgtagaattgggcgactttgataatgtgaagatggaaatattgcagacattggcaatggaagtaccattcacagaagaagagtacaacaagatgagaaaagaagatcttgctgagaaaacctttgaagcggcaatgaacaacttcaagcgcaagacagaccgtatggcccagattgccaatcccgttatcaaacaggtatatgagatgcaagggcatatgtacgaaaacatcatgattcctattacggatggcaaacgcttgtataatatctctgtcaacttgaaggcggcttatgaaacagaaggcaaggagattgtgaagtcatttgagaaggcgattctgcttcatactattgatgatgcatggaaagaaaacctgcgtgaactggatgaactgaaacattctgtacagaatgctagctatgagcagaaagatccgctgctgatctttaagttggaatctgtcaatttgtttgacaacatggtaaataagatcaataacaataccatttctgtattgatgcgtggacaaatcccggttcaagaaccggaacaagttcgtgaagctgctcccgaaccgcaggctcctcgtcaacagtatagagaggaaaagcaggatttaagtgatcctcaccagcaagctgctgccgaacatgacacccgcgaggtaaagcgtgagccggttcgtgcggaaaagacagtgggtcgtaacgatccttgtccttgcggaagcggtaagaaatataagaactgtcacgggcaaaatgcgtgataaataacgattattatagaaacgttcgggtagaatttactacccggacgttttttttattccttttaacttacttcttacataaataagcgtatttttgttccctaagaaaaaatgataatatgaaaagatccgcctcattaataattctagttgccgggacactttttgcttcctgcagcagtttgcagaccatatcttttgaccagttacaggcagccgatgtcagttttccggatgctgtgagaaaagtggctgtgataaacaatatgcctgtactgaaaactaaagataatcatgaaatactgagcagcgaattggaaggcgatggtaaagtggcatccgaagctttggcagagaatattgccaatgtgaattatttcgatcaggtcattatctgtgattctgtattccgggcacaggataaagtgccacgggttaatgtcattctgactaaagaggaagtacggaaattgagcgaggacttgggagtggatatgatattgtcttttgatcgtattcatattcagactaagcccggcgtactgttctatccggattttcctatgcctatagatgctgtagatggaattatatctccgattgttagagtatatattcccaatcgtgataaacctttgtttgtagttgccaagcaagataccatttcctgggaaatagaaccagctctttctgaccggaagatagtaaaagaagcttcggaatatgccgcttctattccagtagaacatctgttgccacattgggatgaggtggctcgtttttattacgatggcgggaatattgaaatgcgcgatgccggtgtatatcttcgtgagaacaattgggatgaagcgtatagtcagtggaagatagcctatgagaagagaaaaggccagcaaaagatgaaagcggcttttaatattgcactatattatgaaataaaggataatgtagaacaggccaaggaatggttgggtaaagcgaagaatttggtgaaatcaggcagcagggatgaacaattgatagccttttattcattggagttagagaaaagagagagtaagctatcccaattgagaatacaaatgaaacgttttgatgataatttttagagaataagtgttgagagaaagattttttttgtacttttggatataaataatatataaaattgattttggtatgaaactcagtgcacagtcacatgcttctattgcgtcttcgcttcgggaagcggttgataaatatatagcggatggagagagaacggtagtcaccgatatccatttgcaacctaagcaggacagtggtgaattagttatttttaatgatgatgacgaagaattgtcacgtaccataattgaagagtgggtggattatagtgaagatgatttttatacaatagtagagcgtatacttcgtggggagatcaacgcattgaaagatacgggagttttggataagttagctataatgaagccttattcttttgttttggttgatgaggatagggaaactgtaaccgaacttttattgatagatgatgaagacactttattgctgaatgatgaacttttaaaggggttggatgaagaattggatgcatttttaaaagacttgcttgaaaaatagataaaataataggagcatcgggatagtaaagtttccgatgcttttttatatcataggtgaggaaaatgttttttcaagagtggcgtttaaaatattgttttctcatccatcggtcaaaaaccatgaataagggtatagttatgatgaatagcagataaatgagaggaatttgtatttttaaaacatgactgccagcaagaaatgcatgatacatagtttccttaatgtgatttccaaaataaatatacaggccgatgctgccgcttattattaagaatagagaagcagcaatagtagctagtaacatctttctctcctgtttcttttcacgtaagagtatagcttcctctactttctgcatggtgcggaaagtaaaattggaggtcagccggaattggggctgttcttttacagccttcattaatcctttatctttttgtttcttgttcattctgcttctgttatgagtatatataatttttttcttattcgatgcaattttacttttgcattgctttccgtcagtcccaggataagagcgatttcaccgatagttttctcttcattataaaatagggaaatcaaggcgcgttcttctgcatccagtttcttgatggccttattgagctttcctacccgttccccgctttcatcattcagggcatcgtctatttgctggtcggatatattcattaacatggcactgtccataacaattaactcttgctttctttttctggttgccgatatggcggtgttatatgcaatgcggtatatccatgtagagaaactactctctgctttaaacgacgaaagatgttcaaaggctttcaagaacgtatcctgggtcaactcttccgcatcctcctgattctccacgatgcgtataatcaagataaatacttgctgactgtatttatccaagaagtattcgtagagagaagtttctccttttaatatcctatgaataatatgtgtttcgtcgttttccattttgtctattagacgcagggctgggagagaggttacataaaaagagaaaatatttttttctttctcaaaagtgtaacctctttggctacgcagcgtctaatgaatacaaaggaacaaaattaataacttaaatacgaataaattatgggttacattaccggttggattgttgtaggtatcattacattaggaatctacaaattatttgaactttttgttggtaagaaagagcgtcttactatgatagaaaaattgggagacaagttagatccttccatgttggggaacaggcttagcctgcctcttcctgtaggaactcctttcatgtcatcttctccgatttctttttcggccttgaaatttggctgtttgttgctgggtatgggactaggcttgttgactggttatattatttgtgcaaccacggttcccgattatttcacagagcgtaattggcgcatgagcgagttaacttcattgatttatggtgcaaatgtcttgctttttggtggtttgggcttggtagttgcttttatagtagaattgaaaatttctcagaaaaacaggaaagatcatacccgttgaataatgaaagacaattagaaaaaagaaagagatgtgtcaaaatttgaagtaattatcaaaactatccgagctttgcagcaagacaatagcagaattacttttgacacatctctttattaaaaaagaagtgatgaccgctttacatagaatgttgcaatctctgtaaagcggtatatttttttattttttcaaagcagcaatactttcttttaaagaagctattttgctttctgcatcagcctgtttcttgcgttccatatcaataacgttggctggtgctttgctgacaaatttttcattgcttaattttttcaatacactttgcaaaaagccttcctgatattttaaatcagcctccagttttgccagttcttcttctgtgttgattaaattgcccaatggtatggcatattcagtggtacctaccataaatgagccggagccgtcagctttattctctacggcttcgatagaagagaggttacacaatttagtaataacaggattgaatgtagctactggatttacatctactacttgcaactccaaagtttctttctgtgcaatgtttttctgtaaacgaatagtacggataccaccgattacttctttcactacttcaaattctttgacgataatctcattacaagcagtcggaatgttcaattgctggaccatcaggctttccccttctttgcggtcatatatatgttgccataactcttcggtaatgaaaggcatgaacggatgcagcaacttcagcaagttatcaaagaagcctaaagttttttcataggtcgctttgtcaatgggttgtccgtatgccggcttgatcatttccagataccagcttgagaattcgtcccagaataatttgtatacagccatcagtgcttcgctcaaacgatatttgccgaataagtcagctacttctgcagctgtttttgccaacatggattcaaaccattcagtggccagtcttgcatattcgggctgtgcaatatcggcaacttcccaacctttcaccaagcggaatgcattccatattttgttattgaagttacgtccttgttcacataacgcatcatcaaataaaatatcgtttcctgcgggagcggcaagcatcatacccattcgcacgccatcggcaccatacttgtcaattagttccaacgggtcgggtgaattacccaaagactttgacatcttacgtcccagtttgtcgcgtacgataccagtgaaataaacgtttttgaacggcatatcacctttatattcatatcctgccataatcattcgtgccacccagaagaaaatgatatctggtcctgtaaccaagtcactagtaggataatagtagtttatttcttcattattaggattattgataccgttaaataaagaaatgggccacagccatgaagagaaccaagtgtccagacagtcatcgtcttgacgtaaatcttccattttcagattggtattaccggttttttcttgtgccaacttcaaagcttcttccgctgtttcggctactacataaccgccttcgggcagaaagtatgccggaatgcgatgtccccaccaaagctggcggctgatacaccagtctttgatattttccagccagtttttgtaggtgttcttgtatttggcaggatagaatttcagttcatcattcattacaggaggcaatgccatgtctgcaaaatgttgcatcttcaagaaccactgcatggacagtttcggttcgatggctacattggtacgttccgagaaacctaccttattagtataagcttctaccttttccagcaatccggcagcttgcaagtcttgttcaatctgtttacgtacatcaaaacggtccatacctacatacagtccggcagcttcgctcagtgttccgttatcattgaagatatcaatgctgggcaagttatatttttcgccaagcatatagtcattcacatcatgggcgggtgttactttcagacatcctgtaccaaattcaatgtctacgtagtcgtcttcgataaccggaatgatacggtttaccagtggtacaattacctttttgcctttcagccattggtttttcgggtcattgggattgatacacatggcagtatctcccataattgtttcgggacgagtggtagcaactaccgcatagcgtccttcagcatcaccttctactttgtaacggagataatacagtttgctgtgttcttccttataaataacttcttcatcactgagagctgtcagtgcttttgggtcccagtttaccatgcgtacaccgcgatagatcaaacctttgttgtaaaggtctacgaatactttgatgacactttcgctacgttcttcgtccatggtgaatgctgtacggtcccaatcgcaggatgcacctagtttgcgcagctgtttcaggataatacctccatgttcttcagtccatgcccaggcatgtttcaggaattcgtcacggctaaggtcagttttctttataccttgtccggccagtttgttcaccactttggcttctgtggcaatggaagcatggtcggttcccggcacccagcaggcattcttgccttccatgcgggcacggcgtactaatatatcctgaatggtattgtttagcatgtgtcccatatggagtactccggttacgttgggtggtggaatgacgactgtgtaaggttcacgtccgtcgggttttgaactaaagagtttgttgtccagccaatactgataccattttccttccacgtcagcgggattgtacttacttgctaattccattttatattttatttatttaattgattatcgcataattgagtgcaaaattaataaaagtcgttggattattatgtacttttgcactacaaaatgatattaataaactgattatgcatacaagaaaagaacaaatggaagcatttggccgcttcctcgatattttagacgagttgcgagagaagtgtccttgggatcggaaacagacgaatgaaagtctgcgtcctaatacgattgaagaaacttacgaactttgtgatgctttgatgaaggatgacaagaaggatatctgtaaagagttgggtgatgtgttgttgcatgtggccttttatgcaaagataggtagtgaaacaggagattttgatatcaaggatgtgtgtgactgtctttgtgagaagctgattttccgtcatcctcatgtttttggcgaagtgaaagccgagactgccgagaaggtgactgaaaattgggaacagttgaagatgaaggaaaaggatggtaacaaaatggttttgagtggagtaccttctgctttgccttcgctaatcaaggcataccgcattcaggacaaggcccgcaacgtgggatttgattgggaggagcgttcgcaggtttggactaaagtaaaagaggagatcggcgagtttgaagctgaggtggagaacatggataaggagaaggcggaagcggaattcggtgatgtaatgttcagtcttataaacgcggcccgcctttacaagattaatccggataatgcattggaactcactaaccagaagtttatccgtcgtttcaattacttagaggaacacaccatcaaacagggaaagaacttgaaggatatgactttggaagaaatggatgctatatggaatgaggctaaaaaggaagaaaaatagtagggttggaagtgttttttatgatgtgtgctatttttgtcttgcttgtttttctgttttaatcaataaagggtattgtatttattctaggtaatttaatgtatggtgatatcaaattgtgttctataagaatgaggggctgtcttttttatgacagctccccattctttatgaaataagttttatatgaattttattctacccattctttgatggcttgtgaaggatcaggatttaaaacagcacctttgttgaatacattttcataaagactgataaagatattcatccagggcgcacagtagccttctattgaattaaatcgatatccgataggagcattagtacccggataaccacgaacaacttgtaactctaaccgtttgtaatcccaaaagatgatcccttcaccccagaattcaatacgtttctgttcaacaaccttcttttgaaactcttttagatcatttgctttacatgtatagctacccacagaagtattataacgaaatgtatttacgaaatcttctaatttagaaataccggctgctaatccttggctcattcctattgcttcggcttcgattaaatacatttcctctatacgcattaacggatagtcaacggcagctccgattgtataatcgttcatttctccatttttaggtcggaatttgatacctgtatatggaggcatatcagcgaaatcatcatcggtcaacaaagttctatatttagttccgggagctttgtgtgcatcttcaggagcaatccaagttgtttttcgccagtttgcatttggtatttgatcgaacaattttttgccgataagcttgtatccttgccattttcggttaccgtaaccgaaagtttgttcaggacacatgcttccggcaaagttgagccaatagctatgtacatcctcggtagtcatgatggatccccatacccatgaattggttagtacactgttgaagccggtagtatagctgtctccaccaaaccattccttttcggtcagaggcattgctccgctttcgttaatgactttgcgtgcgtattcggctgctttagtgaaacaagtttcttttgatgcaatgtttaaatctgtattgttgtttagggtgttgagatcttcagggtaaagttcgaaacgagatcccatttccagccacatacgtgccatcagaccatggacaaccggggtacagggcaagtttttggttgggcgttgataatcactcaaaagctcctcagctgaggctaggtcatctaatatgaatttgtatacggcatagaagggagcacgtggattattacgcccttcttcttctgtggtttcagcggtaataataggtacggttatgccatataaatttttactggctgcttctgcatctaatttctctactcctgtttttttatattcatacattcggactaagtccatgtatatcatggctctataagataggcatatacctttataatacttgttttcgggtgcatcatctgctttttctaaagcactcagtgcattatttacattattcagaaacttgtagttataataccaaatggtattgacaacatcggcatcacccaaatcattacatactccataagtatcaaaaaagtcaaatttgggttcgtggcagaagaagtcttcgcatgcactttctctgattaaattatatccactatatccaaaatcatgataaaattgtggaccgtaacttctaaatgcattaataaatgcgactactgaatttaccattgcgctgatagcttggtcagattttcctatttggtctatggtagctgtgctactttctggaaatacctcttcgatacaactgtttaagcttaatgctgatgacagacatgcagcaatcattagtttggtaatatatttctttttcatattcttgattgtttatgtgttgattagaattgtaaacttagaccggcggagaatgcgcgtacggctgaatattctccggatgaatctttatttccgttccatgttacgcgtgaatcgaaaccttttctttttgaccaataataaacattgtcacaggccacataaatgcgcagattagttagatatagacttctaagtgtttttttgctgaaagtatatcctaattgaatgttttgaatacttatggaagatgcattagttagaaacctgtcggatgtttttacactgtacaggtcattgaattgccattgtggaatatcactttgagtattctccgggctccatgctttataaatatctttgtgaacattgtatcctaaatgagttgaagtaggaggtgacattaatgcttggtaaccatagtcgtatgcctgacctcctatactgtagtttatttgtgcagagaaatcaaaaccataaaatgaaagagaggtattgataccaccgtataggtctggaacagcgtcaccacataagtatagatcagcttgagaataggtggttgttgttttcatctcactggtttgcttatctgtataataccattgtggtttgccttcttcggacacacctgcatatttttgaacatagttagtatacattggaagtccttctccgtaataatacagaccgtttacataaccggcatgtccatctataatgtctgtttttttactttctgcaagacggctgatcttatttctataatgtgttgcattaaagccaatattccatgttacgtttctagtcttgactggtatatattttaaatcaatttcaacacctttgttattcatgtcaccaatattgtcataatagcctgagtaccctaatgataaaggtacagaaaaacggttaagcatatcagttgttctgcgattgaaatattctatgctaccacttaatctaccttttaatagttcgaattctatacctaaatttatatttgtattggtttcccaggtaatatttttatttccttttctggaaaaacctaatgataactcattattgctgttattgatattgtaagtatctacatataagaaatcgtctattctgtcattaccctgttgacctacagaaaactttagttttaataaatcgagccatttaatgtcatccaaccatttttctttggtaagaatccaagcagttcccacagagtagaaattaccccagcgattatccgggtgaaagcgggaagaggcatcgcgccggtaagaaagttggaaaaaatatttgccgtcatagtcgtacatacctcggaataaatatccttcagtattgtatttactcttataggatgactcatcgttggtaccactgatggcaccgtttaattcttgattctgaaaaaaagagaacatactgtttttggctgcgtataattcttcataaacgttattaaagctttcatgacctgccatcaatgaaacgttatgtaatccgaagctatgattataatttaatatttgttgtaggttgagggttgttcgacgccaatgctggacattgatgcttccattcaaagaatttgctgttccataaaaaggatttaaagcatttttgtaccggctgtcacgtatcgaagtgcctgcattgaatgtgaatttgaagtctttcaggaaattaatatctataaatgcgtctccattcaaagtatttgcagaggtgttatatgtatcgagctgacttaattttattccgttagagttcgggttgataggacggtttagaggaccttggttggatactccgaaatcgtacatgtcaccatttttatcctgcatgatcttaccatttgtatcacgtaggtaaagtggatatatgggagctgtattgaaagcttggctaaaaccgccagcggctgaattctgtattgaatgtgtataactgatgttggcgccaaatctcatccacggtttagcctgatatgtggttttcaaacgaccggtgatacggctataatcagacccttctgctataccgtcttcatctaaatatccaaaagaagcatagatttgtgctttatcacttccgcctgaaatattgacgttgtattcttggcgtaatgctgtatgatatacagcatcgacccaattgtcgggagtgagataataaccgtttactatccgtcctaattttgcattaggattaagaagaccgtttttaccaatcagatattctccttcaggatatgaatatacgttgtaggataaaccaccggtttgactgttggttcctatcatattagtatttgcgctgacatatgcttggtcaggagtttgtccttgggcatttaaataataattgtataatgctttatagtgtgcttgataatattctcctggatcttttatgtagtcatattctatttcaccacgggtattggcactccatttagcgtctactgtgatttttgcatcgcctgctttggctgattttgttgttataattatgacaccgttagcacctcgagcaccataaagagctgtggatgctgcatcttttagtacagaaatagattctacatctgctggattgatgttattccatcctccttcgtatggcataccgtctaatacgatgaggggatctgtttttgcgctcattgaactgatgccacgtatcagaatgcttggagtttctccaggctgcccatttgtcattgtcatttgtaggcctgccacttgtccagataaactttctatgacattagtaaccggacgtttagttatttgttctgtatgaatcatttttgcagatcctgtaaaagctgatttttttgcagtaccataagcaactaccaaaacttcttccatcacttctgttgttgaagtcataacaattttcatttccggcttgatggttacttcttgggtttccattccaatgaaagaaacaataattgttttgttggtaggtgagatgtttgtaagtgtgaactgaccattgatgtcggtgattgttccattggttgttccttttaccaatacggaagctccgattaccggttcgttgttttcgcttgagataacggttcctttcactgttacctgtgcttgtgcatggcttattcctacgaataagcatacgaatagtagtaatagtgtctttttcataatgtttgtaatagatttgtgagtttatggtttgtacaaacctaggaataaaatctaataaatcaaaatattttcgatggcaaatgtttaaaaataaaagtatattctaatcaatgtaataaaaacttaaacaagcaagaaaattaacttgtttttataaaagaaacatcttaatcattttgtcgttccgctgaactttttaaatacaaaaatccccaaatctaagttgattgatagatttggggaaaaagttggaaatatctcttgttgcttttattttttttgagattggtgcataatttttaagatatcacggtggaatttaatctctgcacgttgtaacttatatattttcttgggagataagatttttttaaagcgctgtagatattccaaatccaatttatcggcttcaatccttgctttgacaataccttctataatttgttcgtattcggcatcggttgttttaggatttttgcctttgcgtgcttgctcccatgctttatcatttactgtttttttacggtcttgtaattcgaagtagatagggaagaatttagtggcctcttcttgcgttatttctgctttttgcgtgagatatgcttcttgtctagctctgaattcttctttggtgaaaccaggtttctttttgtcttgcgcctgtagcgaaatgcttatatataaagtgataagcaaggttgccagtctttgtatcatgtggttattatttaattatacatatctgaatttgcatctgtcaagtattgatagagcgtataatcatccatcatggaatgatctaaaatcgtttcaatatattcgtctgagaattgttcagtttccgctgctgtaaaaataggagtgtcttgtttagggggacctacaacaactctgacgctgaacatcaatccacaaaacatagctgccatatatatccaaggcttgatacgttgccaagtagttattgtttcttgcggagcagaagtttgttccttctccggcaatttattcatcaactcttttgagaagttgtcgaaataaccttcgggtaccatgaatggattttttgtcccgcatttttttaatagttcatcttcttccttcatagtggttctcctttctttgttagatacatttcttttaaaaaggtttaaaggcattcttttaaaaagttctctatttttttcactgcatggtggtaggaggctttcagtgcccctatacttgttcctaatatttcagacatgtcttcatatttcatttcttgaaagtattttaaattgaatactatacgctgcttttcaggaagcgtcagtaatgctttttgaaataatatttgagtttcatctccattaaaatatgtatcactttccagtttgttcaccatatctgcatcagcgtcgtctatggataattggttggtggcacgttgtttatttaaaaaggtcaagcattcattcaaagctatgcggtaaagccaggtcgacattttggcttcggcacgaaaatactctagattagtccatgctttgataaatgtattctgtaacagatcattggcatcttcatgagaaagtaccatccggcgtatctgccaatatagctgttcgctgtattcgttgacaatacattcgaaggcttctttttgtcgtgccgggtcctgtaataacgctattatttctttctcattataagtgttcatgttcctatttttaaattagatatccggtttatgttatggtttaatggattctattgaaatttttaatgtttcccgtgcaagtagagtgttaggaaaaatatccgatgcttcctgtaacaatatgctttcatcttcgtagcgggctgaaaaatgtcctataagaagttgttttacttttgcggtacgggcgatttctccagcttgcgaagcagttgtgtgaaaggtttctttcgcacgggcttgttcgctttgtgcaaaggtggcttcatgaaataacaggtccactccgtatatttgttctatgatacgtggcaaataaatagtatctgaacaataggcatatcggcggggaagggcagaagggatagtcaatttgttgtttggtactatttttccgtccggtaatgtgtaatcggcgccattctttattcggttgagttcgtatacggggatttcataaaagttaatcatgtcgcgacgaatatgggcgggggtctgtttctctgaaaagaggaatccgcatgttggtatccgatgacgtaagggaattgtttctatggttagcgaacggtcatcataaattatttcagctttgcccggatcaaaagtttggaaaacgactttgtaactcatacctttgcaaaaaaagtcgagttgcggagtaagaagacgttctaattctgcgtgacagtgaatatagagtgtggctgtccttcccagcataccgaaagttgatatcagtcccattagtccgaaacaatgatcaccgtgcaaatgtgaaatgaatatatggtttagccgggtgaatttcagttttgatttgcgtaattgcatctgtgctccttcgccacagtctatcataaatagtttttcacggatatttacgacttgtgatgtcgcaaaatgccgtgtggtcggcaatgctgacccgcatcctaatatatgtacttcaaatttctccatcgttacaaagatactatcttttttgaatggaaaataaaaaatgccgtaaaaacggcattataggattgaactatttcttaagttttattttcacagcattcatgccacgtgaccctttttctagttcaaaagtcacgatgttattttctatgatattgtctatcagtccactaatatgaaagaagtatttctctgcattcttcaaatcttttacaaatccatatcctttggatacattgaagtgttctattcttccttcatgtactagttctatcggttcttcagttctacgaggagttgaaacttcaatggtggacatatccacttcttgtggtttattattaggagtgggaggagtatcggttatcataccgttctcgtctacataggcaatcatatcttcaaaggaagatgtgccgttactttttctttcttcttttttttgctgttttgctaaacgcttttcttgttttttcttttctagatctcgtttggtaaatgaaataggtttcgccatttgattctttttaaattagtaatatacagttcggcctgctacggggaagtgtatggaattaatagtgaggtaataagaaaacgggggagaagtcgttatgaaatactaactcgaaattttattactctataaagatacggttttattacggatatcccatagaatattttcctttttaagaaataatggcataaaaaaaggatgcattttaataaatgcatccttttggcttatcttaaagtaaactgattacttctttttgttttccaactgttctttcaaagcagccaaagcatcgatatcgcctaaagtggtagaggctgcctgattttggatagcaggagcttcttctctcttagttgttttctttgcattagaagctgctttcttttcagctctttcttctgccttggcagcatcttcgaaaatgcggctgtgagacaggatgattctcttggcatccttgttgaattcaattactttgaatgacagtttttcatccaattgggcttgagagccatcttcttttaccaagtgtttcggagttgcaaaaccttctacaccataaggaagagctacaacagcacccttatccaacatttcgatgatagtaccttcgtgtacagaacctacagtaaatacagtttcgaatacatcccaaggattttcttccaactgtttgtgaccaaggctcaagcgacggttttctttgtcgatttccaatacctgaacttcgatgtctgcaccgatctgagtgaattcagaaggatgttttactttcttagtccaagacaggtcagagatgtggatcaatccgtctacaccttcttcgatttctacgaatacaccgaagttagtgaagttacgaacttttgcagtgtgcttggaacctacaggatacttttcttcgatagtttcccatggatcttgtttcagctgtttgatacccaaagacatcttacgttcgtcacggtcaagtgtcaggataacagcttctacttcgtcacctaccttcatgaagtcctgagcagaacgcaagtgctgtgaccaagacatttcagatacgtggatcaaaccttctacgcccggagcgatttcgatgaatgcaccgtagtcagccataacgactactttacctttcaccttgtcacctacctgcaagttagcatccaaagcatcccatgggtgcggagtcagttgtttcaaaccaagagcgatacgtttcttttcgtcatcgaagtcaaggataacaacgttcaacttctggtcgagttctacaacttctttcggatcgcttacacggccccaagacaggtcagtgatgtgaatcaaaccgtctacgccgccaaggtcgatgaatacaccgtatgatgtgatatttttaacagtaccttccagtacttgtcctttttcaagtttaccgatgatttctttcttctgctgttcaagttcagcttcgataagagctttgtgagaaacaacaacgtttttgaattcctggttgattttaaccactttgaattccattgtcttacctacaaatacatcgtagtcgcggataggtttcacatcaatttgagaacccggcaagaatgcttcgataccgaatacgtccacaatcataccacccttagtgcggcacttgatgtaacccttaataatttcttcattttcaagagcagcgtttacgcggtcccaagaacgagtagcacgtgcttttttgtgtgacagaattaactgtccttttttgtcttcctgattttcaatgtatacttctacagtatcacctattttcaaatctggattgtaacggaattcatttaaaggaatgataccgtctgatttgtagccgatattgacaactacttcgcgtttgttcattgcaataacagtaccgtctacaacctcgcggtcgtttactttgttcagtgtaccgtcataagctttttcaagatcttcgtggctcatgctggttacagcttcgccgttttcataagcatcccagttgaaatcttcaacaggagtgatgttttttaaattttccattaataaaattgttaaaattctcagttaattacgttagacattatattgtttatctaatttcgggcgcaaagatacaacaaaatactgaaacacaaacaagtttactgaaatttcttgctgattaaaatttaaatgggatataatcgttgtttttaatttatgtttgtacatttgtagaaatttaacctattaaaatatggtagcgttcattttagtttgtttggttctacttttaggtcttttatggggatgggagataagaaagaggaaaagtttggaacaggagttcgttaagaagaaaaatgaggtgtgttccgtgaaagaattttcggataccatattgtataatgtggatgcatatataattttggttgatcggaattttttggttgaaaagaccaattactataatttgaataatacttctgaaggacaggtgctgcgtagggtcggggaattgcttcgttgtaaaaatggattggacgccggagcctgcggttctcatgagaattgtaaagtatgtcctgtccgtaactccattgaaaagtgctttcgggaaaaagggcacttttctccgttggaaactccgatgagactttatatgtctgaaaagatggataattatgtcgattgtattgtttgcgtgtcgggaacatatttacagttggatcaggatgataaggttctgctgacagttcgtgatgtgactcgtcagaaaaagattttggatgaattggaggaggccaggcgaaatgcggaatgggcaggagaacagaaaacagcttttctggcaaatatgagtcatgagattcgcactcctttgaatgctattgtgggatttgccggattattggggaccgcgtcggatcaagatcgaatttcttatgtagagattatcaaggggaacacgaatatgttattacagttggtaaatgatattttggatatgtctaagattgaggcgggtactttggaatttatttataccgatgtggatgttaatcaaattatgcgtgagttggaaggtattttcagattgcgtttggaagaggcggatgttcctgtacgtatcatttttgaacctaagctgcctgtctgcttcattcatacggagaagaaccgtatttcacaggttatttccaatttcttgtctaatgcttttaaatatactgtgcaaggcagtataaccatgggatatgagatacgtgaaaatggtatctgtttctatgtgtccgatacaggtaccggtattccggaagataaagtaagtcaggtctttgaacgttttacaaagttggatgccaagcgtcaaggtaccggattggggctttctatcagtcggactataataaaaaaaatgggtggtgagattggtgttacttcaaaatatggtgaaggttctactttttggtttgttctcccggaaaagccttttgattttctgccattacagtcggaagagaaagaacaatttatagatttgtccgagccggagagttgtttggaacataaaacgattttaattgcggaagatatggatgataattatttgttgtataagatttatttggagaagaaatacaatctgatacgagctgaaaatggtgaagaagccatttctaagtttttggaatatagtcctgctgttattttgatggatataggtatgcctgtggtggacggttatcaggcaacggaagcaattcgtcaattgtcatccaaagtacctattgttgcagtgactgcttttgcatacgatgaagataagcggaaagtaatgtccagaggctttaacggttatttgtccaagcctctgaacaaagaagctttgtttgatatgctccgccaaatgggaatttaatcttccaaagagtaatcaatggtggttacaacgcggatgcgtttgatgtaaggagtgttggcgtcacgatcctcaatgctgaattgtccctgataggctctttttatcttaccaagttcgctgtccgagtccttggcgaatttaacggctgccgcccgtgcgtttttagttgcttcctctatcatttgaggcttgatgtcgtttaaaccggtgtagtcatattgcacattgtaacgataatctccacccgtaatagcgataccttgctttaagagttcgctttgttcgctgatcatctttctcaccagatctactttagttgaagtaaccgtgatgacagaggtcacattatagcggaagggaactgaattattattataacgttcggcttgcatatctataatttccggtgcattgatactgatttcgttttcagtgattcctttctgtttcaaaaagccgacaattgcttggttggttgcatttatcttgttatataaggtcgggaggtcatttcccaggtctttatacatcaaaggccaagttactttattggccggcacctccatttctgccagacctttcacattcactactctgtctttaccagagaaagtatccaatccctgtttgataaaataccccatcaccaacatgcctatagcaaggatgacggcttccagtttccaacttttcatacttcagttgtttttagtgatacaattatttgttttgtaagcgtccaatgcctttttaacagaaccctgttcttgcagtaattgttttgcttctgctttattaatatgtaattcgtcaatcagcatttgcactcctcggtctattagttttcgattgctgagttgcatgtttaccatccggtttccttttactctgcccagttttatcatgacggtggtacttatcatattcagtatcattttttgccctgtgccgctcttcatgcgcgagctgcctgtgataaattccggacctactatcatttcgatgggtatatctgccacactcgagaggggagagcccggattgctgctgatgcttgctgttaatattccgtgttctcttgctttttgcagtgctcctattacataaggagttgttcccgatgccgctatgcctatcagaatgtctttatttgtgatgtgatggtcttgcagttccatccagcctttttgactatcatcttcagcattttctacgggacgtttcaaagcctgttcgccaccggctataatacctatgacacaggtatcaggcataccgaaagtgggtggaatttcagaagcgtccaatactcctaggcgtccactggttccggctcccaaatagaatatgcgtcctccttgatgcatacgttctactatttcatttactagtttttcaatttgtggtatgcaggcatgaacggctgaggctactttccggtcttcttcgttgataccttccagtaactctctgacggatttttgttccaaatcctcatgtatggacggttgttcggttatttttataaaattcatacttcgaaatgataatcctttaatccttccagtggactttttaaaacttttccgatggacacattcagtcttagagctgcttcttttacttcttcttgaaagaaaaatgcaatagaacctgtgaaatgtacaagaatatcatgatattcgtattgcataacattacgggtgaagaaatcagtgaagcaggaaattaatagattccgtatctctggtctgtgcttgtgggcgaaaagaaaaggagtcagacccgccagaaagcggttggctaaaggctgtcggtatactttatctaaaatcagtgccggggtcaaatcgtattctttaaggaaatcttggcaaaggtcatcgggaagttggtgtttcagtaaatcacctaccagacgtttccctaatacggctccgctaccttcatctcctaaaatataccctaacggagaaatattagctgttatttttttcccgtcataaaagcaagagttggatccggttcctaaaatacatgcaattcctgccgttttaccacatagggcgtgggcggcacctaacaagtcactttcgacaaggatattcgctttggggaagttctgcgccaaagctgttttcactatattcgtcttttcgggaatacatcctgcaccatagaaataaatagttgtaaattcagtggtgtctcccaactggggaattagtgtggaggcaatcacttcttttatttcatcaactgattggtggaagggggtgatacctcctgttcgaactgtcctgctgtttgtcttggtgttacccagacaccagtctgttttggtggaaccactgtctgctattactatcatatcggataataagatgattgttagtcttacaaaaatagtataaatttatccgatatccattgttttccgtatttatttgtcgggctcttatattattttagtaactctgttcctattacttataagttagtgctttttcatataaacagacttttttaataattgagccacagcttcattgcagctatcttttctctgcttacagtaattttatctttaaatggcggttttacctgtactattatttttgaaaaaaaatagttttctattttctgtatggcatgtacactgaccaatgtttgccggttggtgcggaaaaaaatatcggggtttagttgttcggacagtttgtcgagcgataaatctatgatatgctcttttccttcttttgtgacggcaaaggtaattttgttttcagaatagaaataagctatatcttctacttgcaaggtatacagcttttcgtctcctgatatcaggaagcgggtacggtattttttttccggattacttatatttttcagtaggttcagtaattcattggatgggttcgatagggtggtattgccatatctggcagttaatctttcaaacttttcgatggcttcggccaatctttccctgtttattggcttcagcagatagtctatgctgtttacagtaaaagcacgtatggcatattcgtcgtaagcggtggtaaaaataatcatactttcgggttgggcctgttctatgaaagcgaaagaaatgccgtcggtcagttggatatccagaaagattatatccgggtgtggatgctcctggaaccattttacagatccctctatgctgccgggcaatacaactatatcccagtctggccttaatcctgacaacattttatgtagcaggcgtcctgcaggaatttcatcttctataatagcggcttttatcttattcattcagtaaaggtatttttacggtgaaatattcagaatcgtcaataattgtgatatgcaagttgcaaatcagcagatagcgggcagataagttcttcagtcccattcctgattttgcaacatccttttttaatttgatcttgtttcttacggaaagagtttgatctttgttgtatgaaattacgaaaaaggtctaagtgattgaaaatgagttgcagttaccaactcatagtaataataggttacgaattagttagttctctgctgttttattcttctgcgcgttgcgtaaccttcaaagaactcttcgtatgcaaaagtagcactttaatggcatatattgaaataaaaatccagctttttaagctccacagacaagtttttccgtaaaagcgaatttattcgtaggaacatcatcatcaataaattgacgaccatgttcctactattgcataagcatagaaaagggctttgcgtcacgcctgaaccatgttcagactgatgatgcaaggcccctttcttttttttgcttatgccacaagcggtgcttttacggctgttacctgttgattttctttttttgtcggttcctctaatcgaaaacggaagtcatgggtaaccacaccttccataaatgaaaagtgccattacccatgacggcaaaccggaaagaaaattgcaaccgcataactaaacaggtttagccacacggttgcaacatactttcttggaatgtttgccggtttcacgttttcgccgtatcccttctttttgagatttcctttctttcttttcccggaacatttcatatccaatatgcctccacatccgtttacctccattttgatggtctttcagacagtcgcatcaggtggatcgttcccgttctgggtgcaaaggtaaatccgggattgggatgctcaatggtttttagaaaaaatctccagccctgcaggtagtattttttctttgaaaacccttgctctacccactccctacctttttgaagcacccgaaacgaaaacgaccgaagcgacagaaagacgcattaaaaaaaatgtcggataaacgggaggcatataaggttggaaactcaactccctcagctctcgaatccgcattaaaaataaaaacaaatggatatggaagcagcagtagcaacaaaattcgtgaagtgggaagttccgacattggaaagcctacatgagtgtaaggtttacagacttcgtatgaaagtgaacaatggcgaggtgctgaacagagaggaaaagaattggataaccgaaaaggtaaacggcaatacctatttcaaaagtgcgataccattgcaaggatggcggtttgacttctccgacatactgaggacattccttgtaagccagtacggacaatggagagaatacaaggttatggacaagacggcactccgtaagatattgtacggaagaattgacagaattgtagaacttgacaaacgacacccaaaatgacagcagcaatgaacataagacagacagcgcaatccattggacttgcagtattcgcatttctgttgcgctgtttcctttggatagtcaatatcctttggtacatcatcagagaaatagtctgtggagtattccgaatggttatcaatgtaatggtattcatcatattcctcattgccattttcggctttctcctatggctactgacactttgaattaactcccaaaagcatagcattatgaaacgatacagcaagacagcagcgcagcaatgcagattttacgaggtggacaacatctttgagtatatggtggaaacctacatcaacggcaaccattcaaccctaagaaggctataccacgaactcaacaaggaagcgagaaaggactttatcggttttcttttggtggaatgtcctccacaataccacacggagattttacaagagattgtctgacccaataaatgaacggatatgaacaggacaacggaaaagatacccacatggagtttagcctatatcatcaatggtgatgcaaccgcactcacagacgatgaagttcagacaatagacagatggatgaagcgatggcaagtacaagatgtttcacccctcacagatgaagaagggaacgcacagccttatttcacccattacccccttttcggacttcccacagaagtggaagattgcgagatactttatttgaacgacaacccgactaaaatttgagattatgatgaaaggaacagaccatttcaaacgaaccatacagatgtttttggagcagagagcagcggaagatgaactattcgccaaaagctaccgcaacccagccaagaacatagacgattgtgtcacatacattctgaactatgtgcagaaaagcggttgcaacggcttttcagacggagagatttacggacaagccattcactattacgatgaaaacgagattgaagtaggcaagcctatacaatgtcaagtagttgtaaaccatgtggtggaactgacagaagaggaaaagcaggaagcaagaagaaaggcggttgcccaatatcagcagatggaactccaaaagttacagaaccgcaacaagccgacagcgaaaaaagaaacacaagtccaaccctcattatttgatttttgatatgaaaccgagaacacgcatacagaaagaggtagtccgtttgtcaagcggactgcccgaactgacagacaagcagaaagcatacgcttttgaacattgcttcaagcatcatgcctaccgcacaaaaggcggaactatcacttgttcggaatgtggacaccgctggaaaggcggacacactcttgcggaaactatatgtggctgtagctgtccccattgcggaaaggaacttgaaatacttgatacccgaaagagagttttcagaggcagcgcatattatgaaatcattacgacccgaaaaggctatcaagtgttgcgctactttatggtaggagcaacatacaaggtgggacagaaggcagagtattccattcgggaggtggtgcaatggtggattgccccaaacggaaagaccgaagttattgcccgactgagagccatgcacacgatgtactatgacctttggactgaatggagcgatatggatttgcgcagcaacaagatgctgaaagcatacaacatagacgcatacaagacttatccggcaatgcgcatcattcccgaattaaaacgaaacggcttcaagggagcattccacgaactgaccccatacgaattttttaccgccattctgacggacagcaataaggaaacattgcttaaagcgggacagacagaaatgttcagatatgccgtcatatcaaatatcaatttacatgaatattggaactccataaaaatctgtatccgaaacggctatcatattgcagatgcctccatgtggtgtgaccttgtaagactgctccgacatttcgggaaagatacccactgcccaaaatatgtttgtccgacagacttgaaaaaggcacatgaccgacttgtcagaaaacgcgaagaacagatagaaagggaaagagcggagcaacgcagggagcagttggtcaaggacgaaaagaattatctgaagtccaaaggcaagttcttcggacttgtgtttaccgacaaccttattcttgtaaaggtcattgagagtgtggcggaaatgcaacttgaaggtaaactgatgcaccattgtgtgggaagctatcacaagaggacagactcccttatcctatccgcaaccattgacggcaaacgcattgaaacggtggaggtttcactgacaacattcaaggtggtacagagcagaggtgtatgcaattccaataccgaataccacgaccgcatcatcagtcttgtagagagcaatgccgaacttatccgcaagcggatgagtgcttgatttatagacttcaaaatatacatgatatggaaataaagatagaaaacatactgatattatgggacgagaaagtaaccgacatctttgtcagtctgataaacaccttgtccttgagtttcagcgaaacggaaatccgcaattcaatggcgaaactttcagaaaacgagaacttcggaagactgttcgcctacggcttcggagcgcatcacctttgggtagcccaaaggatgataaccgaccccgaaaaggtaatggagaaccgactgctgattgttgaattttaataaatgactaccatgacaacaagaatgaccatcaacggagtgagtacctgccagacggcaggtactgagaagtacgaaaagtaccaaacgactatcagacggaaaagaacaacccttttccagtatgactaccgacacacggacggagaacttttctcttgcgtgagaccgacattgaaggagtgcagacacctgcgtgatgaatggataaaaggaaaggaggacagattatgacagcatactatgatagtgcgcccgtataggcgatataataaatgtagcattggcaagctattaggtaagtgttccaatatttacctatcatcaccagcttatctgcccacgaaaggacggcagggagtatagcacgctggaaagccataagtcaattagttatcaaattgcaactgaatggtgagatgaaacagatagatacgaggataaaatccaaactgattgaatgatagtccaagtgaacccagtatgttttatagtgaaagataacttaactcgctataccgtaatacctctgttgcgagcgtcgtgtagtagaggcaggaacaaattacggcacaaccgcagtaagcggtaacgggcggaagtcatatccgacaatctatcatagccatgttattatatcgtaaacggggattgcctaaatcggaacgccgcaaggctattaggtacagacctatgaaaatccgacaaggcaacggagcttccgtagtagtctgagcaggggaaagccctgtacatggcgaagggaagcagctaataattttaatgcaaataacggaaaatgtgagagacattatgagaagtccagagtatgtattaaacagtctaacggaacacagtgaaaatttgaattacaagtttgaacgcttgtaccgtatctttttcaatgaggaaatgtattacgttgcctaccaacgcatatatgcgaaaccgggcaatatgacagcaggtgcagatgggaaaaccattgaccaaatgagcctgaaccgaattgaacaactgataacatcgttgaaagatgagagttatcagccccaaccctcaaaacggatgtatatcccaaagaaaaatgggaaaatgcgtccattaggtgtaccagcttttaatgataaattattgcaggaagtggtcagaatgatattggaagccatctatgaaagacagtttgaaaaaacgtcacatggcttccgacctctaagaagctgccacactgccttgtctgatattcagaagacattttcgggcgtgaaatggttcgtagaaggtgatattaagggatttttcgacaatatcaatcatgagatactgataggtattctgaaagaacgtatcgctgacgaaagatttattcgcttgattagaaaatttctgaatgcaggatatatcgaagactggaactttcataactcctacagcggaacaccgcaaggcggaattgtcagccctatcttggcaaacatataccttgataagttggataaattcatgaaggaatacactggaaaatttgataaggggaaagaacggaaaagaactaaacaggtagtatcacttgaaggcaaacgacaccgtattctgaaaaagttgaaagtggtaaaagacaaaagtgaaaggtcagaattgataagacaatataaggcttatcaaaaagaaggtttgcagtattctgatggtgacgaaatggatatgaactacagaaaactcaaatatgtgagatatgcggatgattttctaattggaattattggcagtaaacaagatgctatcatcatcaaagaggacataaagaacttcctctatgaaaagttagctcttacactgtctgatgagaaaacacttatcacccatgctgaaaacgctgcaaaatttctcggatatgagatttttgtaaggaaatccaatgacaccaaaagaagcaaatacggagtactaagacgtgtcttcaataagaggatacaattggcacttggaatgtagatactaattgaaaagtgcgccaatattccagttgaaaattgcgccaccataggataagtataatgacctttgtataatccaaatgcaaaggtaaaatgaagactatggtagaaagacaatcaataatacacatgtatagagtatgcggttatagcaaacggcgtatctctcgtgaacttcatgtcagccgtcataccgttgacaatattctttcaaagtacgaatcagccatccgcacggacaatccagaagaggctttgagtgatttgcttaccatccagcccaggtatgacagttccagacgccgtcctcgccggctcacacaagagattaaggataagataggattttgcctgaagaagaatgccgttaagatagctaccggacttcgcaaacagcgcatgttgaaaaaggatatccaccagtttctgttatctcaaggatacaccatcagttacgccacagtatgcagttatataaaaaatatagagtcatacaaagagaagaaaaagagcgaagcctttatccggttgttctatgagcctggatgcattgccgagtttgactggggtgaagttcttctttttattgacggcgtcaaaaccaagttttatctggccgtattcactttcgggcatagcaatggcagatacgcctatcttttcaggcatcagaatacgcttgccttcatggaatcccaccgtaactttttcagggatatacatggtgtccccgccatgatggtctatgacaatatgcgtgtagccgtcaagagctttgtcggtggtgataagaaacctacagaagctttgatgaagatgtccggtttctattgttttgagtaccgtttctgtaatgtacgggccggatgggagaaaggacatgtggagcgcagcgtggaatatgtcagaaggaaagctttctgcctgacagaccattttggtgatatacattctgcccaggagcatttaaaccgggtatgtatgcaggtcaacaacgagcaaggcagtctttcaacagcggagaaaacatcacgtctggaagctgacctgtcatcgctgaagccttttcccggtaatctgggctgttttgaggtctatgagtacattgtggataaatggtcaactatcagcatgaaaaatgttcattattccgtacctgattctcttgtgggagaaaaagtacatgtcaaggtttatagtgaaaaaatcgtcatcctgcacgggaaggagaaagtggcctctcatcaacgcagttattgcggtggagactggtgcatcaagctggagcactatttgcgtacactttcccgtaaaccgggggcattgccccactctgtggtttggcaaagagcaccggaagaactgagaaggctgtatgacatccatttcaaggaggacaacaggacgtttgttctgttgctggactatgcccgaaaaaatggattttccggaacggacattgtcacggcatgcaaggagctgaccggacgtggtgtcagaaagatatctccggaccaggtaaaggccatgctgcatggtagcgtacagggagagacagaagaaaccatggaaccgcctgttctcccggcacaacaggagaatatagaaagagaagctgtggatatgcttgaaggcatcacggcgctcatgacaggatacaatgaagtgcatgatataataccaaccatttaagtttataatatatgaaatcagaaaaagaaaccatttatgactatgctgcagaactgaagcttctggcctttaaagaggaactggaatgcaccctttcattggcagctgaagaaaactggaaccatctgcagttcttgacggaattgcttggaaaggaaagcgccaggagaagggagtgtagaagaagatcaaggataagatctgcgggatttccacaaatgaagtatctgcatgagcttgttatggaagacatgcccaaagaggcacaggtaatattacctgaattggagacactggacttcatcagacagggaagaaacctggtcctgtatggaaatccgggaacgggaaagacgcatattgctacggctttaggaataaaggcctgccaacaggactttaccgtattgtttacttcagtgccggtcctgcttacccagataagggaggctaaatcagcaaagacactgaggacgctacaattaaggtttgaaaaatacgatctggtcatctgtgatgagttcggatatgtcagttgtgacaaggaaggaggagaactgctttttaaccacctgtcgttaagagccggaaaaaaggctacaatcattactactaatttggcttttaacagatggaatgaaatcataaaggacaaggtgcttgtggcggcaatggttgacaggcttacacataaagcttatctggttaatatgaccggactgtcttataggcttaaggaaacacaaaaaatgagacaagataaatgaatattttaaacttatagtaattttgtaacaagttatggatggagctcttttcaattagaatacagcgcacttttcaattagtatctacaggcaaagttgctgttcaacggcacattcatctgccagtctacgttaaaatgtacattttcccaggtctgtgctttacttgtgaaacaaaagagaactagtaacattccgatgaggatacgtttgggaactctgtgttttaatattttcgttttcatgattttccggttttattgtttgtttgacagataaggagattgtgcaaatgcctgattgacggcatttaatgtcaactgcatattgaaatgggagtttccgtatagcagtcctgacgcataggcatgccagatgacaggcagtttgttctggttggacttatcggcaggttgtcttaaatcaaccatctccataatcagggttcctgtgtcatagctgtaagttaccggataaggataataccatcctcctccccagtagggcccccagaatccggcatcccaccagccgccataccatcctcctgtggtcatttgtattctttgttgggcgtatgacaactgaatgcctacattggctttttctttatcttccgtccgtacatagcctttctgttccatttcatgggccactgcactgataatgttttgggcattttcatctttccaataattggctttcaggctgttgtccggaaccagaatgctatctggcaggtaataggtggaaaactcattgaaatgtgcactgttgtcataatcagtgtaaacgctgtagtcactatccagtttattcatatccggatctttctcgcacgaagtaactatcatggcaagcatgaatagtggaaatagtagcttcttcatattcctataattttagttaagtagtttatagtgagcgtcctttaaacacattggctttctttaatggcaatatttgaccggataaagtcatgtggctggaattaaagttcggaagaatatctacagtcgcattgttgcttccataaggtatgtcaatgtttacttgggctgagattccgattcccatcacgttcatactgacatgaatattaccttttttgtcggtttttactttatagttcgaagcattaccgtctacggtaatacctcctagtccgttcggaccgctgaaaggtacattgaatgctacttgcaccacggccttgtcaccgtccagtcctacaaagttggtgttggatgaaacgaaagcggaggttccgtatttaaagtaaactctgtccgcttccagtacaaaggtttggttgtctattgcctctttggcttcctgaaataacattttgtccaaagcttcctgagccgcttttttttcctgacgtgtcatttccttttctgttgtttgtgcctgtgagtattctacgcaggtaaacaaggttactaatgttaatattacaacttttctcataatacctacttttttattttatgttgttttcctattgaaatccggtataaatataataagctttgtcataaacaggtagtaatttattactgaaacggaaaaaccggttgctgaagtgtgttttggaggagctgaaattaaaggtgtgaagaggaatgaatgagaaaagaacagccctggaaatctgctttaacaaaatttccggggcttattttctatgaactataaagtgattagaaagaccttcctttaaatatatttgacttgtcaagcggtagtatttcaccggataaagtcagacggttggaattgaagttggggcgtatatctacggtggcattgttgcttccataaggtaatgttatacttacctgagcagatatacctacacccattacgctcattgtcagatatatgcttcctttcttgtcggttttgatcttgtaaccggaaacattgccgtctacagtgacacctcctaatccgttaggaccgctggcaggaatgttgaatgctacctgcacggatgatttatcaccgtctaccattacaaaattggtattagaagaaacaaaggcatttcttcctcttttaaatataacccggtcagcttccagtgtgaacgctttattttctatagcttgtctggcttcttcgaacaaggcttgttccatagctttttgcgcctctttcttttcctgacgagtcattttttttgttgtttgtgcttgtgagtagcctacgcagcaaaacaaggtgacgaatactaataaaataatctttttcatatatgtatcttttatgttattgtttggatatgaaacaaatataataattattttgttgaaaggactttatcttattttttaattaaaagcttctatgactttatattttgtacaatgtgtcaaaaagggggaggacagtatggcgaatcctggcgcaaaatccaatggaacttgatgcaagattgggtaaaccttgtaacaagatattgcggaacttgatacacataagtatgtgttggcttatgcttgcgtatatgtagcccgatgccaacgtatgttgcaagcttacgttactgatgttgttgaatatgtcttcatgtttttagaaaacatcagcacctttttaaaaaaggtcagcatgttttaaaaaaaggtcagcatgtttcagcgtacatgcctatcatgttcagcgtacattactccctcactaaaccgatgttcttccttctccattcatcctttcatcttatttaaaacacacagtcaatcaagcggttaaaaatggaaccgcttcccctcactcccgtttcaacggtaagcgtctcgtaagcgtctccgcgattctatcttgtcgcccttttttcattcttatatttttgccatatataaaaatgaggcattatggatttagcagaaaatcgatttggaaaaacctggaaacatttccttgaagtattgaaagtagactacaattgttctttagccgatgtttgccgtgatcagcataccactcttggaggtatgagttcctggatgtccagacggggttatagcgttaaacaagccaaggcggatgtggtccgtgattattatggcggcgttgaaccctcccgaccgacaacttcctctccttcgttcactcaaatagcccccgtcatgttgtcggaagaagagtttagtctttccgggatcacaatcacctttaacagcggaacgaccatttcggtcaaacgggccactcccgggggtattattaaaatgttacgcgattacgaaagaaaggagggggatccatgtattctctaacatcagccaatcgctactatctgtaccagggctttgtccgtatgaaccttggcattgacggtttattcaaaatcatacgctctcaaatgaaggagctgtcccccatttccggagatatatttttattctttggcaaaaaccggcagagtgtaaaaatactgcgttgggatggtgatggctttctcctgtactacaagcgtctggaaggtggaagttttgagttgccgacatttaacccccatacaggcaattatgagatctcttatcaggttttgtcttttatcttaaatggagtgtcattgaagtctgtacggttgcgaaaacgttttaggatttaatgtaatatactgtatattaactgtttgattttaaattaccatccgattattttggccgactcattgattttttgtatctttacgccatgaaaaaggatgaggtcatagagttattgaaggagcaaatcaaggagttgcgggatgataacaacagactcctggaccagatagatgatttgataaaggaggtttcttcccttaaagaggcactccttcaaaaaggcgaatctcttggcaagcaacagcgtcttaccaaggggatcgccaaacttgtatcaaacacatccgaacagcaacaaccccctcaacctgcattgccggaggaagagcggcagaagagagaagcagaaaaagcagataagcgtaaagccagaaagaacaatggggccaaacgtgacatgcattatgagatggagcaggaggaacatgacgtttatcccgacgatcctgattttgacatcaataaagcccggctggttaccaccgctcccagaatatgtgtccgctatgaatgtgtacccatgcgcttcatcaagcacgtctacaagatacacacctacgcgcaagacggttgtctctttgagggaaaaacaccggtctcggctttcttgaattccagctatgacggctcattcattgccgggctgatggaattgcgttatatacaatcgctaccggttgaaagaatcatcaactacttcgaaagtcatggctttacgctgaagaaacctacggctcataagttgatggaaaaagcctcaagcctctttgaaaatctttataagtgtatccggcagacagctttgagtgatccttataaggcagccgacgaaacctattacaaaatactcgtcccggaaaagaacagcaagggaaaaggagtccgcaagggatacctctgggtggttgtgggcataaacaccaggatgatatacctgctctatgatgacggctcccgctctgaaaaagttattcttaacgaattaggcggttgcaaaggtatcatacaaagcgacggatactcaccttaccggaaactcgaaagcgatgcttatccccatatcacacgcattccgtgcctgcaacatataaaacggaaatttatagattgcggtgaggatgacccggatgcaaaaagaatcgtggagatgataaacacactttatcaaaatgaacataagcataagatcggggttgacggatggacggtagaacagaatcttgtccatcggaaaaagtatgcgccggacatactcggagaaataaaagatgtgcttgatgatatagaagaacggggagatttgttgcctaagagcgaactgaaggaagctatcacctatcttcgcaatgagtggaatgccgtggtggacatctttaattatggtgacacttacctggacaacaatatagttgaacggatgaaccgctacatatccttatcaagaaaaaactcattgttcttcggcagccataagggagccgaacggggcgccatactatacacgatagcacttacttgtaggatgaataaagtgaatctgtttgagtatctcacggatatcataaacagaactgccgaatggcaaccgaatacaccactggaaaaatacaggcaactgcttcctgacagatgggaaaaggctaatgactaaaaagggatcattagactttttacttttaatatactatatagaatcgcggagacgcttacgagacgcttacgcggaaaggaggatgaaaggacaatgacgggatgtcccttcatcaccggaacacccaccggcagggcgttttgacggtaaatgaaaggaggagggaaaaacgaattaaaacaaatgctgaagtgcggagcctataatttcagaatttctaacggacccttcccaactgtgccgctatgtttgagaatgaactctgaaaagaaccatatgttttttgtgtgcgggccagcgtgtacatatctgcgacaccctccctgattccttccagagagccacaatccgcctgtctttccgaggacaggctgaaataaaggtcggatcaacctttcttcttgccgaactccggatcaatttttagcagagccgttactccgaaggtgataacgcagcatatcataatccatataaagaaatgggtgtatcccatctgttcctgaagccagccggcagccattcccggaatcatcatgcctaatgccataaatgcggtacaaatggcataatgtgctgttttatgttctccgtctgcaaaataaataaggtagagcatataggctgtgaaaccgaatccgtaaccgaattgctctataaagatgcaaatattgatgagatataaagaatcaggctggatatagctgagataaacatagactaaatcgggtaaggaaatggcccataccatcggccagagccattgtttcaaaccgttacgggctacggctattcctcctaaaatacctcctagggtaagtccgatgatgccgacagtaccttgtacgaaacctatttcttcggttgtcagccccaaaccacctttttcaacggggtctataaggaaaggaatgcacatttttgccagttgagcttcgggcaaacggtagagtaacatgaaaagaatggcaatgcctgcctgctttttttgaaagaaactggcaaaagtaccaaagaactttttgagcagattggaagcggaaacttctttggaagtatgatctgaatccggacagggaagaacaaacttatgataaatccatattccaaggaaaagtccggccaatacaaaaaaggtgagggaccaagcgtatggtatattatctgtcattatttccagtcttcctgcaagcatgataagtaatccttgttccgcaatggttgcaatacggtagaaggtactgcggattcctacaaacagggcttgccgatgcgagtccagtgccagcatgtaaaagccgtcggcagcaatgtcgtgtgtggcggagctgaatgccagtaaccagaaaacggccaaagtgagttggaaaaaatgctctgtggggatggtgaaggctatgcccgccagtcctgcgccgattaaaagttgcatggtgataatccaccagcgttttgtcttgataagatcaatgaaagggctccatagaggcttgataacccaaggcaggttgagccagccggtataaaaagctaattcggtattgctgatgcctaatcttttatacattatgaccgaaatggtcattactgccacatagggcagcccttgtgcaaagtatagagtgggtatccatgcccatggcgaggtatgcttgtttttcatggttcctttcattttaaagagtccgaatggaatccccgcccatgtgggcggggcctgttaataaaaacggcggatgtccgcacctttatagtaatgcaatagaatttcatcgtaggtatatccccgttctcccattacggcagccccgatttggcagagccctactccatgtccccagccggcgccggtcagcagaaaccattcgggaacgccgtttttcagttctcccttatctattacaaaggctgagctgaacaggtgggaagaagatagagtgcggcgtatttccagttcctttccgatagtcaatgtttttagcgaacctacaattttcagtttgcagatacgtccggatttgccgcgttggataggaatcaggtcgatgatgtccccataatccgattttgtattttgacggatcagttcggataattctgcctgggaataacgtactttccaacgatagaaatctgtagtttcctgatcgtagttgttcagaatttgtgaaatgacttttttatcgtgggtgtcacagaacgaaacaggagaagtgcgtatccaacgctctgcctcttcttctttggtcagatcgggtaacgggcggttttcttcttcttccgcatcacggattgtagacaagtagggataattcttgtcttcccagcagtatccgaattcctcgcttgctcctccgcagcatttggagaaacgggcatcgcaaatgccgcgttcatacatcagcaattgtccgcgggtggctcttactgcttcggtcacggcagcactggatgctttggttattccttggtagcgttggcaatggtcatcggcgcaaacatcgaatatggtatgatcttcgcggtcgtaccagcggatgtattcggtatcggttttgataaaggagaaaaagccttcgtttttgtcactcaaggccttgcgtttctctatttgggcaaacagccagctgcgtgataccacggcatgggctttcagaaactccaaagaggaagtggcgttcatctccgaggagatgacgcttatcagatagtcttcggcgggaagaatattgatagcggtgattttgccttcgtccaccactagtttcagtgttcccataaaactttgggtttcttgccgttcccagtggaaattaattccgatggttacgtcatataatgaaaacgaggcatgttcgtcttgtggagtgaaggtcagttcgcggtaaagattaccattccacagaatacctccttcgctgaaggctacttgttgttcaccacagactgtttctcctttagcgaaaaaattgccgttcagtgaaaaatgaatttcttgtgcgtttactattcctacgcttatttcgggttctttcattgttattcgtcttgtttttgggcttgctgtaattccttcatctcttcgtgttctctctatctttttgctttctcgtcaaaataacgtccgggtatcttctcggcttcttctactgttattcccacttcttttatgatggatgccactttttcttctgttattttgtcgaaatcttcctgacgggtggtgacgattacgccagccatgtccaaagctcccggactgatgagcatctgttcgctgccttttgcaaagtagcagtcgggacggtgcttgctgcggggaaaaaccaccgtatagtatagatggccttccttccataacagcaggttgaacttcgcttcttgtccgtcttcatccggtgggaaagcggcgagggcgctgtataacagggagtcgtcataatgcgtgttgcttgagaggattaccaaaggacagggatagtccttggtgttgaggtaaattcggctacattctagtggataatcttcctcttcttctaggtagggaaaatacatgctgcgtatatcgattgtctgtgcgtgggttatcagctgttgtacgttcgggatgatgggaacatcagtttttctgactccttgaagatggagatggtccggtgcagaggctccgcaatgtgctccattatagaatagggcgtagtccggatatttctgtacgaatgcacggacgtcatcgtaactgaaaatattctcatccatgagttgggggatgtgatctttatgggcgatagtgaggtgatccggcaatatgggataagggttaacgcatattctgtttgcagtgatggtttccagtgctttctgctccttaggctggttttccttgcacaggaaacaggggcgtgcttggatgctgtccttatccactttggcggtagtcgaaaccgcacgctgtgcattgcactgtaccacaaacgtgtagccgtttatggacagttccttgatctgtacagtctgtaatgcctcgtggttgtggtgtgccagtggccagcacgccagttggctgtgtataaatcgcttgatttcattccggttcttcagctcttctgtatattttttgcggattcccagttcacgggtgcgcaggctgtctttgtagtgattgttggcattggtctgctctatgctcagggcggcatccgagttcccttcccagcggcggcacagatagagtacatcatagattcttcctatcttatattggcgcgagaaaatgagtcccagggcataatcttctccgtagctgacattgggcacgcctgtttcgcgcaggataggtgtgaagaatgcgcgcggagcccccagaccgttgatgcgcaatgcgttattgtgtccgttctctttcgtccactcgctatggtctatcactcccggagcgatggtgttcagccggaagtccgtcatgcggtaagttcctattaccatggcgcattgctctttgtagaacgtgtctacgatggtttgcagggtatgggtgtcgctgtacaggtcatcgctgtcaagctgtatggcgaagcgtccgcaccgggggtggttgattgcgaggtcccagcatccccctatgcctagatcggtacgttggggctgaaggtggattaccgctttgttgtccttgtattgaccgatgatttctgtggttccgtctgtcgagtgattgtccacgacgatgatgttgaatggaaagcgtgtttcttgtgtgagtgccgaccggatggcatcgtcaatggtacgggcgcgattgcgcacggggatgatgacggaggcttcatattcgaaatttcctttctttacatccgtttccacacatatgggttcaaggagggcattgatggatttcaagtatcgtgtgaatgcttcttccatttctatctgtacctccctgttacggggatttacgtagtcgaactgcttttcgccggacaggcggttgtcgctttctgtttccgtataaagatattcgttgatatgtaccagatgagaatggagggtaaggaacagacgcagttcataaagggcggcatactttctttcctctgtcatttggagactggcgaggatgaattccgttctgttgaatatcagtagcggaccgaagtcgaaatcatcacgcacactgccgggttggtagtcgttgacgggatgtttcttcttttctccgtttttccattcatgatggtcggcatagaccatgccgcattctctgtcctgcaggaagtccgtcatgcgttccagtgccttgtaagccagttccaaagcagaagttttggtatagagcaatatataaggtgtgtctgctttttcagcaatcatcttcattgtcttagaactggttagtgaatcaacaggtaatatttcgcatccttcgggggtggataatgtcttgttgggttcaatgttcagcagatagattttgttgactatgctactttcttttagagcatggattgtctgttctgccgctgtgctttccctataaggaataaagcaattaattgtttttctcattgttaaaaagtatttctcacggcaaagataggtaatatatcttattttttctctacctttgtacgctaattgtcttttaaatataaatggaaactccgaaaacagcattacttggcaggacattggatgagattcaacagattgtgaggaatctgggaatgcctaaatttgccgcaaagcagattacgtcttggttgtatgataaaaaggtggaaacgatagacgaaatgaccaatttgtcattaaagcatcgcgaagcattgaaagaagggtatgaggtgggagcatctgctccggtggaagaaatgcgttcggtagacggcacggtgaaatatcttttccgcacaccggcctctcactttattgaggctgtttatatacctgatgaggaccgtgccacactttgcgtttcctcgcaagtgggatgtaagatgaactgcaaattctgtatgaccggaaagcagggctttacagctaacctgactgccggtcaaatattaaaccagatctattctatccccgaaagggataagttgactaatattgttttcatgggtatgggagagcctttcgacaatctggatgaggtgttgaaagtgcttgagattctgacttcagaatatggttacggctggagcccgaaacgcatcactgtttcttctgtgggtttaaagaaaggactggagcgctttctgaatgaaagtgattgtcatctggctatcagtatgcatactccgattccttcgcaacgaagggatttaatgcctgccgagaaagctttttccattacggaaattattgatatattgcataattatgattttagcaaacagcggcgtctgtcttttgagtatatcgtattcaaaggggtgaacgattcacttatttacgctaaagagattgtgaaacttttgcgcggcattgaatgtcgtgtcaatttgatccggtttcatgccattcctaatgtggatttggaaggggtagatatggaaacaatggttgccttccgtgattacttgacgcagcatggcgtatttgctacgatccgtgcttcaagaggagaagatatttttgctgcttgtggaatgttgtcaacggctaaacaacagaaggagaaaggtgttacattacagtaaataacaacaataataccatataattatgaaacgaatagcattttatttaagtttggtgctggtggttctggtactggcttcttgtaagaagggacaaaagaacttgtttacccccacgtccagcggtaggccttacgaagtattggtcgtagtaaataaacctgtatgggatcgtcctgcaggacgtgcattgtttgatgtattggataccaatgtgcccggactgccccaggcggagcgttcgtttcgtatatcaaatgtggaccctcagcattttgatcgtgtgctgaaaatattccgtaatatcatcattgtggatattcaagatatttatactcagcccaaactcaagttttcccgtgatgtttatgcgtctccgcagatgattatgacaattcaggctcctaatgaagacgaatttgaggaatttgtagcaaagaacagtaaagtgattatagatttctttgtgaaagctgagatgaatcgtcagatagctttgttgaaacaaaaacatagcgatgtgatttccactaaggtaggaagtatttttgattgtgatatctgggtgccggtagaactggctaactataaagaaggcaaagattttttgtgggcttctactaatcgtgctacagcggatatgaattttgtaatgtactcttatccttatacggacaaggatacctttactaaagattatttcattcataaacgtgattctgtaatgaaagcaaatattccgggtgaacgcgaaggaatgtatatggcaacagactctatgtttgtagatgtggaagatattgttgtaaaaggagagtatgcgcaagaagcccgcggattatgggaaatggaaggtgacatgatgggaggtccgtttgtgtctcatgcacgggtggatcgtgctaacggccgtgtcattgtggttgaggcctttatctattcaccggataaattgaaacgtaatctgatgcgtcagatggaagcttcactttatacattgagattgcccaatgaaagcttgattgacgaaattgtaattagtggtaatattccggaagaaaaaatagatacaacaagccgggtaaagtaagaagagacatataatatataatatagatggaagataactacaagatacgagttggtattactcatggggatatcaacggagtaggatatgaagtaattctcaaaactttttcggatcctaccatgctggaactttgtacacccattatttatggatcgcctaaagtggctgcttatcatcgtaaagcaatggatattcaaacaaatttcagtattgtcaattctgcagatgatgctcagccggataaactgagcatcgtgaattgtacggaagacgaattgaaggtggagctctccaaaccgacaccggaggctggtaaagcagctttggatgcgttggagagagctttgcaggattatcgggagggaatgattgatgttttggtaactgctcctatcaataagcataccattcagtcggaaagttttcatttccccggtcatacggaatatattgaagagcgtgtgggggaaggacagaaggcgttaatgattttgctgaagaatgatttccgggtagctttggtgactggtcatgttcctgtacgcgagatagcacaagatattaccaaggaacttattatggaaaaattggctgttttccatcgttctttaaaagaggattttggcatcgacagtccgcgtatagctgtgttttcattaaatcctcatgcgggtgatgagggattgattggtacggaagagagtgacattataattccggcaatgaaggaaatggttgccaaaggcattcagtgtttcggaccttatccggccgatggctttatgggatctggcaactatactcattttgatggaattctagctatgtatcatgatcagggattggctcctttcaaagctttggcaatggatgaaggagtgaattacactgcgggacttcccattgtacgtacttctccggcacatggtactgcgtatgatattgccgggcaaggggttgccttggaagattcttttcgccaggctatttatgtggctatggatgttttccgtaaccgtgttgtcgagaaagagattcatgcacatccgctgcgtaaacaatattatgaaaaacgggatgatagcgataaattgaaattggataccattgatgatgaagattaatggacgatcggtttaaaatataatttcaagaaaaagtagaaatgaaatttgcaattatatcagcgggtgaaggttcccggctttcgcaagaaggggttgctttgcccaaacctttggtgcaactgaacggagttgccatgattgatcgcttgatacagatttttgtacgtaacggagctgataaggtggttgtcattattaataatgaaagtccattgacaaaagagcatttggcaaaactacaggcagaagcaaagatcccattggaagtagttgtgaaaactacccccagttccatgcacagtttttatgaactgagcccttatttgcaggatgataaattctgcttgactactgtggacactatattccgtgaagaagagttttcgacttttattgaaacgttcaaacaatcggaaacagatgggtatatggcggtaacggattttatagatgatgaaaaaccgctttatatatctacggacagtgctttggatataacaggtttccatgatgaggcgactcccgaatgccgttatatatctggaggcatttattgtctgaccccggcagccgttaagacgttgcatgggtgtatggagaaaggtatgtcacgtatgcgtaactttcaacgacagttggtagccgacggcttgaaattaaaggcttatccttttacaaaaattttggatgtagatcatgctggtgatatcgtgaaagctgaaaattttctagccggtaaagaggagtaacttaaacacaacagaaggaatggatgtaatttcaataataggggtaagccgtggaaatgaatattcccccaatcatgtagacaatgatgccgccatatttaataaggtgacggaggaattgcggcggttgggctgtgaggtgaaagtttatgcggagaaagatttcgtggaacagggtgtcaagggagatatcatttttgatatggcccgtgataaggtaacgatagctcgtttgaggtctttggaggatgaaggtgcattggtgataaactctgcctacggtatagataattgtgtgcgtaagccaatgacagaattacttataaagaacggggttcctcatccgcaaagttttataatttctacggcagatgagtatttggaaaattattatccttgttgggtgaaacgaggtgactctcacgctatggtgaaagaagatgttgcctacgccacctgtaaggaagaagtagaaaatatattggctgatttccgtaaacgcggtattcctgttgcagtcataaacgaacatttgcaaggtgacttggtaaaattctacggagtgcatggaaccgattttttttattggttttatccctctccttgttcgcacagcaagtttggtctggagaaaataaatgggatagctaaaggaattccttttagcgtagaggaattgaaaatacaaagtgataaagctgccgaggcgctgaatgtgcccatttacggaggtgattgtgtgatttcagctgatggcacactgcgaataatcgattttaacgactggcccagctttgcccgttgccgtgaggaagcgggaggtaaaattgcagagtgcatttataaacgggctaaaaagcaaatgaaataaaaaagacatgagtacagaaagtgagaagaaaggaatagaggcttctttcaaatccatggacacagaggagttcctggatatttatttcaaccgtcccataggttatgcatgggcattattttttaaaaaactaaaggtacaccctaatgtggtaaccattttttctatcattttaggtataggtgctggtgtgatgttttattatcctgatatgaaacatactcttttgggtatacttttgttgatgtgggcgaatcattatgacagtgcggatggacaattggcgcgtttgacaggacagaaaacccagtgggggcgtatgttggatggatttgccggtgatatttggttctttaccatttatgcggcaatttgtctcagactgatgaaccaacccatgccgtttcatattggtgacggcatgcattggggtatttttatttggatattggctattgtttcgggtactgtttgtcatagcaaacaatgtacattggcggattattatcgtaatattcatttatactttttaaaagggaaaagcggaagcgaattggataatttcaaacaacagcgtgaaatcttctacagtctgccgtggaagggaaacttctggtggaaagctttcttgtatttctatggtaattatacacgtcagcaggaaagaatgactcctaatttccaactgttttatgcattggtgaaggaaaagtatggagacaatattccacaggaattacgggatgaatttcgtgcggctagcaaacctttgatgaaatataccaatatcttgacttttaatacacgtgccattgctctatatatcagtttgttgattggcgaaccatggttgtattttgtgttcgaggttgttgtgatgacctctttgtttgtatatatgcgtcattgccatgaggcgatttgcgcacgattgtatcataaatacataacgaagtgaaaagtaagtatagaaatatattcctgatgtttggaattgcagccatcgtagtgatgctttgttcttttgatatggagtatgatgaactactggctaatttgcgccgggcgggaatgtggttgccggctgtggtagggttatggattattatttatctgttcaataccctttcttggtatattatcatccgggatggaaaaaagggaacacctattccattttggaaagtttataaactgacagtttccggatttgcactgaattatgccaccccggtgggattgatgggaggagagccttaccgcattatggagctgactccttatgttggggccagtaaggcaacttcatcagtaattctttatgtgatgatgcatattttctcgcatttttgtttttggtttttttctatctttttgtatctggctctacgtccggtagatattgccatgggaactatattggctgttgtgggggcggtttctcttttagccatttatttttttatgaaaggttacaagaatggtatggctgtccgtactttaaaattgcttcagcatattccttttgtcaaagaatgggctaaacgtttttcggaaaataaacgcgaggctttggaacgtgtggacagtcagatagctgaactgcataaacagcgtagatctacgttttatgcctcgttaagtctggaattcatggctcggattataggatgtctggaagtgtatttcatattgaatattctgacaacggatgtcagttttccagcttgtattttaatcatggcatttacttctttgtttgccaatttgttctttttctcgcctatgcaattgggcgcacgtgaaggaggctttgctttggcggtaggaggattggctattccgggagcttttggggtttataccggattgataacccgtgtacgtgaattgatttggattgtaattggtgtgttgttgatgaaagtcggcaatggtacacctgctaataagtaagataatggatacattgaaaaatattcagggagttatatttgattatggcggtacgatagatacgaacagctgtcattgggcggaagtgttgtggactaagtatatggaacatcaggtgccggtggataaggaaagtttccgtgaggcatacgtttttggagaaagggcgttggctaaatatccttttgtccagccttggcataattttcatgatgtgctttctatcaagactaaacttcaggtggaatggttggcggaacagagaaagttgcctatggatgagttgcaactgcaatcttatgcagtgaaagtggcagacagctgttatggctatgtgttggatatattgcaggttacacgcccggtagtgaaggagttggctaagaggtataggttggtgttggtttctaatttttatggcaatatacagactattttaaaggatttcggacttttggatttctttgatgagataattgaatcctctgtagtgggtgttcgtaagccggatcctgctatctatagacttggagtagatgctatgggatttgcggcagagaatgtgctggtggtcggagattctttctcaaaagatgttgttccggccaaagctgtaggttgtcgcgttgcctggttgaaaggagaaggttggggaggagaagttatagacgaatctgttcctgatgtaattattacggacttggctcaattgcttgcattattgtaataggatatggaaatacaaagacacgcattggtgaaaagggactatttagttccttttgttttagtaacctctttgttctttttatggggattcgcacatgctattcttgatgtattgaacaaacattttcaagaggtgatggatattacccgtactcattcggcaatggtacaggtgatgttttatctaggctatttcataatggctattccggcaggattgtttataaccaaatatggatatcgtaagggagttgttttcggattgttgctttatggaatcgggtccttgatgtttattcccggcgagtattggatgtcatttgaatttttcctgttctctttgtttgtcattgcttgcggtttggtctttttggaaacagctgcaaatccttatatgacagaactgggggatagggaaacagctgccagtcggttgaacctggcccagtcttttaatgggctaggatgtatttgtggtcctttagtaggaggactgttattgttctcggggaagggagaagcaaatatctcgtatccttatatgttgatgggagtggttgtactggcagtgggatttattttttcccgtatcaaacttccggagattgttcatgttgacgatttggctgacggagaaacggttaagagaagtttatggtcgcataaattattcttattcggaatagtggcactattcagttatgagatagcggagatttctattaatagtttttttatcaattatgtggtggatgacgggtggatgaatgctcgggatgcggcggtagtactttctttcggtggacttggattgtttatgtgcggacgttttgccggtagttggatcatgcagcgaatccgtgcggagagagttctgctatgctgtgctttggggacggtaatggctacttttcttatcgtttgtaatttaggaaagatttcattaatagccttgtttttggtatacgtgttcgaagccatcatgtttcccactatttttgccatatctttgaagggattgggtggaaagaccaaacgggcttcttccttccttatgatgtctcccgtaggaggggctgttggtcctgtgctgatgggttatgtggcagataatagtaccatgtccttatcattcatcataccatttgtttctttttgtattgtgttattctattcgtggtatgctgacgtggaaagaaactgaaatgaataatcccgatacagttgttaggctttatcgggattgtccatttcttcttaaattttttcagcttttaaagaactggttcggatgatattccatacatcctcttcggttttgctgaaaggaccggatgcctctagtttcagtgtcgacatagctgctgcaaaacaaccggcttcttcataggaagcccctttattacgcatatataaatatccggtagcataagtatctccacagccagtggcatctactatgtctttaggaggataggcagggattttatgaaatgtaccttccgcataaattatagaccctaagcttcccaatgtaatcaatacctcttttactccccattctgctagttgtagggcagcttgttttatgtctgtctgaccggtaagcacttccatttcatgttcatttacctttagaatgtcaatatattttagtgcttctactttgtctgtccaatctatcggataaactttttcccctcggacttcacgtaagtacccttgtgcatctacagctaatatacctttggtagaaagatatttcacaacgtccaaagagaaatcatctgctaaaagacttcccaaatgaaaaatatgagcatttatgttctctagttgttctacggtgaagggatcggctttagccaatacccgctgactgcggttgtcttgattctcaccgtatgtattctcaaaatacactgtccggtgactaggaataacagtaactttgatgcctttagcacgaatatcttcaacagctttaaattcacttggagctagtgccgtgaccagctgataatgctttgtatcctttaagtgactgattccgtgtgagaaataataagaagtcccgccgggcatataagtcgtttttctgggtgttactattttatctaatgtaatgtgacctatgcaacaaatatcattcatacctatttatattaaacggtcgcaaagctacaaaaaaaactagaaaaagcatggaagttttcaaaagaaggtgtaactttggcacaaattatcttaatctctgctatgagatgcaattttaacaaagaaattagaatggaaaaaatgaatgtgaaaccggcaaccggtaaattaggcgttctttgtgttggattgggcgctgttacttcaacttttatgacaggtgtgctgatggctcgtaagggattggcaaaacctgtcggatctatgactcaatatgataaaatgcgtgttggccgtggagagaataaaaagtatttgcattatggtgaaattgttccattggcaaacttaaatgacattgtgtttggtgcatgggatgtttatccggctaatgcttacgaatcagcagtcaatgctgaggttttaaaagagaaagatattaatcctgtaaaggatgaattggagaaaatagttccaatgaaagctgctttcgaccacaactatgctagtcgtctggatggtgataatgtgaaagattgcaagaatcgttgggatatgatggaacagttgcgtgaagatatccgcaattttaaagtggctaacaattgtgaccgtattgtcgttctttgggctgcttctacagagatttatgttcctgttgatgaaaaaatacacggaacattggcggcattggaacaggctatgaaagatgatgataaggctcatatcgctccgtctatgtgctatgcttatgctgcactgtcggaaggatgtcctttcattatgggagcacctaatacaactgttgatattcctgctatgtgggagttggctgaaaagactaaaatgcctattgccggcaaggatttcaagacgggtcaaacgttggttaaatcaggtttcgcaccgattattggaacccgttgtttaggcttggacggttggttctctacaaacattttaggtaatcgtgatggtttggtgttagatgagccggctaacttccacacgaaggaggtcagcaaattatctacactggaatctattcttgttccggaagatcagccggacttgtatacagactactatcataaagtacgtatcaattactatccgcctcgtaatgataataaagaaggttgggataatattgatatcttcggatggatggggtatccaatgcagattaagattaatttcctttgccgtgattcaattcttgctgctcctctgtgcttggaccttgtattgttgagtgacctggctgcacgtgcaggacgttttggtatccaacgtttcttgagtttcttcttgaagagtccgatgcatgattatactgaaaacgaaattcctgtcaatcacctcttccagcagtatgctattttgaaaaatgccattcgtgaaatgggtggttatgaggccgatcaagaaatcgactaatttataacaggattttttattcgggcgtggattgcgcgggttttcacggtttttcttttaaagaccgtatctatccgtgaaatccacgtcttattttttatttttctgccataatttcttgttgtctgcctgagaatttgtaattttgtcatataatagagtgaatatggttaggtcagaaatacaaaatgtaaagctcagatttggtattattggtaatgccgaagggttgaaccgtgccatagacgtggctatccaggtggcacccactgatttgtcagtgttgatcaccggtgaaagtggggtgggaaaggaaaatttcccacagattattcatcagttcagtcgccgtaaacatggacagtatatagcggtgaactgtggggctattcctgaaggtactatagattcagagcttttcggacatgaaaaaggtgcttttacgggcgctatcagtgaccgtaatggctattttgccgaagccaatggtggaaccatttttctggatgaagtaggagagttgcctcttgctactcaggcacgtctgttacgtgtacttgaaagtggtgaattcattaaggtaggttcatctaaagtgcagaaaacggatgtgcgtattgttgccgctaccaatgtgaatctgacggaagccattgctgaaggtcgttttcgtgaggatttgtattatcgtttgaacactgtacctattaaaatacctcctttgcgtgagcgtggagatgatataactttacttttccgtaaatttgcatcagattttgctgagaaatatcgtatgccggctatccagttgacagaagatgcgaaagttttgttgctggcttattcgtggcccggtaatgtgcgccagttgaaaaacatcactgaacagatatctattattgaaactaaccgggatataacggcagagattttgagaaattatttaccagagcaacatgtgaattctggtttgcctgctttgtttggagtgaaagcaaatacagggaaggcttttgaaagtgagcgtgagattttgtatcaggtgttgtttgatatgcggcgtgatgtgactgacttgaagaagttagtcaatacactgatggcggaacgtggcgcgcaatctgttccgacggcaccagctactacggcagtttcttattatcaggaaccgcaacggaatctagttgctacagtggtgcctgctacgcctaccataatttctgccgccaaaccggctcatcctgtagtagatgatattcaggatacggaggaggttgtagaagaagccactttgtcattggacgaagtggagaaagaaatgatacgtaaggcactcgaccgtcatcatggaaagcgtaagaatgcagcaaaagatttgaatatttcagaacgaacactttatagaaaaataaaagaatatggtttggattaaacaattgaaagtagttggtgtgttgatggtactggcggggatcgtaactgcttgttctatttcatataaatttaacggatcgtctatagattatacaaaggtaaagactatttcgtttgagaatttcccaaaccgttcagctggctttgtttggggaccgatggagaatatgttcaatacggcattacaggatatttatatgcaacaaactcgtttaaagcaagtcaagcgcagtggtgacctgcaattgtctggtgagataacgaattatgaggcatttaataaaggaattggatccgatggctattctagtatggtagaattgcgtatgacggtgagagtgaattttgtcaatagttccaatcctacggaaaatatgaacggacagcaattttcggctagtcgtgaatataattccaatcagcagttaagtgctgtgcaggatgagttggtaaaccaaatgattaaagaaattgtagagcaaatattcaatgctacagtggcaaactggtagtgagtgattttccgtcatgatacaacaacaattatatgaatggataacgcatcctgaacgattgaatcgggatactttgtacgagttgcggacgctgcttgcgcgttatccatattttcagacggtgagactgctttatctgaagaatctgtttttattgcatgacataacatttggtggagaactacgtaaggctgcattgtatgtagctgaccgcaagattcttttttatctgatagagggggagcgctttactgtatcttcctttgaaaaacaagacctacctaaggaagaggctggtttggatcgtactctttcattgatcgatacttttctttcttctttgcctgaagagcccgttgttatggaattaccaatggatgtaacaacagattatacttcttttttattgcatgaggaagaacatgtgtctgatgatatacctcagatgaaaggacagaatttgatagacaacttcattgaaaagtcggcagaggaacctttgttacctcaattaggaataaaagaggcggcaccggtgaagaataaagtttctgaagaagaggagtcggaagataatgaagaggatatggaggatgaaagctatttcactgaaacattggctaaaatatacgttaaacagcaaagatattctaaggctcttgaaattattaaaaaattaaatttgaaatatccaaaaaaaaacgcttactttgcagaccaaataagatttttggagaaattgattattaacactaaatcaaaataaagaaaatgtatttattacttattggattaattgtgcttgcagctcttttgatgtgctttgtcgtactgattcagaactcaaaaggtggaggcttggcttctagttttgcttcttcaaatcaaataatgggtgttcgcaagactacagattttattgagaaattaacatgggggttagctgcttttatggtggcatgtagtgtgcttactgcttattttgttcctgccgctcatacagattcttctgtaatcatggaagaggcagtgaaagaaggagctactaatccgctgaatgcaccttcaggtttcgctgctccgcaaacaaatgacgctgcaacagaaactcctgctcccagtgattcggcacagtaattatagagaaaacattttccttaattaataaggataagcgtcctgtttcgtttacgaaaataggacgcttttttgttttaagtttttttgctttgataagtatgcttttgtacttacttttgttctggaatgtttttaatctacaaataataaaagaatcatgttgaaattcatatcatggaatgtaaatggcttgcgagcctgttatgataaaggttttgttgatgttttccatcgtttagaagcagactttttctgcctgcaggaaacaaagatgcaggaagggcaactggatgccaagtttgaaggttatcactcctattggaattatgctgaaaagaaagggtattcaggcacagctatcttttctaaagtcaaaccattatctgtgacatacggtttaggcatagaagagcatgatcacgaaggacgggtaatcactcttgaattggaatcgttttatttgattactgtgtatactcccaattcgcaggaagaattgcgacggttggattatagaatgaaatgggaagatgatttccgtgcctatctgaaaaaactggaagaaaagaaacctgtcattgtgtgtggtgacctgaacgtggcgcataaggaaatagacttgaagaatcctaagacaaaccgtaaaaatgcaggtttcactgatgaggaacgtgccaagtttaccactttgcttgagtccggttttacggatacgttccgctatttttatccagagcaggaaggaatctattcatggtggtcttatcgttttaaagcccgtgaaaagaattcaggttggcgtattgattattttctcacttccgattcactgaaagataggttgaaaggtgcacatatttatacggatatctttggctcagatcattgtccggtagaattgacaatagaactctaagaaacactctgaaaaagcttttgtttcaacacgaatctcagattatctataattaaaagataatctgaggtttgtgtcgttgaaagactctctctgttttacttccgtaaattattgattcttgtttatctttactttgaaaaaaacaaactataatgaaaagtacagatagagttaggtataattattattctattgattttgcttgcgtgtcaattgagtttattacaaaaagccagtgtatggatggaaagtggattgcgttcggccattcagaaggaagttcttatttttatagtagaggatatctcaagtatttgatggtggaataccgtttgttccctgtttttattataaagattagaatatgtgtacagattgtcaataccagaatctttgctaaactaaaagataagggatatttgaacacagctccggctgtcttataattgggagagggaataatctgtttattattgtatataccttcaaaaattgtttgtattaggactttcgtttgaagaaagagttggtctgctagatgtgtaattttgttctgtagaccgtgtggcgtataaaatttgtagaaaaatggggttaagataaggaagtaaagaggtatttgtggcgcaaatttcccgtttggatgattgcgccatgaataatatggtttacatagctacttcaatagccagtatctgtgtttcggaagtggcttcgatagtgacactttcaatgtcccatataccgataccgtcacggcgtgaaaggttttcgcctgctacattaatctctccttctataacaaaaatgtaaacgcctgtgcgaggtttgtgcatacggtatattacactatgtccggcatcaaatgtacctattgaaaaccaggtatcctgcaacagatgtgccggtgtgtttccggaaggagaaatgaaagttgccagttcgttacgtttcaataacgggcggatattataattatggtactcaggtttggtttcctctacattagggatcacccagatttgcaggaatttcagatcttcggttttactggcattgtattcactgtgatagatacctgttcctgtactcattacttgaatttctccgggggtgatggtactttcattttgtacattatctccgtgtcttaaatatccttgtaaaggaatggatactacttccatatttttatgcgggtgcatgccgaaaccttctccgggagccactgtatcgtcattcaatacgcgcaaagcaccgaagtgtatacgtctgggattataataatctgcgaagctgaatgtgtggtaagtttttagccatccatgattaaaataacctctcgtgttggctttgtcaataatcgtcttcataacttaatgtcttttctattggaatgttgttattgatataacaaattagaagttgaaaagtttggaacattgttgagtaatgaaaaaaaaggggcggtgtaaaataaaagaagagatgattaaatcatctcttctatagagcggaagacggggctcaaacccgcgaccctcagcttggaaggctaatgctctatcaactgagctacttccgcaattttttgtgggcaaagatggattcgaaccaccgaagtcgaaagacagcagatttacagtctgccccatttggccactctggtatttgcccattcgcttttaagattctatctcaattctctcattgagtaggtttgtttctcaattgcgatgcaaaggtacggcttttttttgaatatgcaaattatacaagaactttttttcaaaaaatctgcgttttttgcaatttctctttaaaatcgagcattttgatggcagttattgcacattcatcccctttatttcctaatctcccaccggcacggtcttctgcttgttgcatagtattggtagtaatcaaaccatagattacaggaatatctccttcggcattcagttgggcaataccttgagtggtaccggcacatacataatcaaagtgcggagtatcgccacgaactacgcagcctattgcaatcactgcatctacttttccactttttatcatttgtgcagaaccgaaagtcagttcaaaactgccgggtactgtttgtactaaaatatttttatcttttgcgccatgtttcttcaaggtacttatggctccttccaatagggggccggtaatgttattgttccattcggatactacgataccgaaacgcatattttctgcattaggaactgaattgaaatcgtaatcagataagttatgatacgctgttgccattgttttttagttttagtggtttaataaaagaaagaggttatctgtacacaggtgcagacaacctctttatatcattaaggtatattcttttcttatttgatggatgcacgttcgatgtacttatcaatgtccattgactggtaagaattgaagtatttttctttcaccaaagtgtatgctttaacagcttcactattcttgcccaacttttcgaacaattgaccagcttggatcaaatagataggactcaatgcctggctgtctgctttatccgctgctttcagcaaagttcctgcagctttgtccaattgtcccatttcagcataacagttaccgatagttcccaaaatggcagggctcaccagctggtctttagcgctgaatttatccagatatttcactgcatcttcatatttacccaactgtgcatagcagatacctgcataagcattggccaaattaccagcagcggttccactgaattcatctgctactttcagaaaacccttgtaaccgatactgtcaccattcaatgcggtttcaaagttatcagctccgaaatattgttctcctttaaataaagcttctgatgcttttacttcattggggtcagaaataaaatgcttatatcccatgaaaccagctatgataatcactactgctgcaatagttccaaggattcttcctttgtacttgataaggaatgcttctgaggtactcagtgcttcttccatatctaatgggtcctgagtgtgtttttgttctgccatttttatatttacttttttattatttttcggatattctttttcggtcagcaaaagtagttcatttctatgtattaatgaaatttacgggcatatttttttagtttttcccgtttttatctctaattttgtatcctcaattaaatagaagttctatgatactgaaacgcatctcgatattgaattataaaaatctggagcaggcggaattggaattctcgccgaagatgaattgttttatcggacaaaacggtatggggaagacaaatttgctggatgcggtttattatctttctttttgtaagagtgccactaatcctattgattcgcaaaatatccgtcatgaaggagaattctttgtaattcagggtttctatgaaacagaccaaggtgagccggaagaggtatattgtggattgaaacgtcgtcagaaaaagcaattcaagcggaataaaaaggaatataaccgtttatcggatcatattggctttattccccttgtaatggtgtctcctgctgatgcggagctgattgcaggaggtagtgacgggcgccgtcgttttatggatgtggtgatatcgcaatatgataaggaatatttggatgcgctgatacgttataataaagcattgacgcagcgtaatgctttgttgaaatcggaacaggaattcgatgaggaattaatgctggtatgggaggagatgatggcatctgcgggtgaggtcgtctttaagaagcgtagtgagtttattgctgagtttatacctactttccagtctttttattcttatatctctcaagataaagagaaagtgaatctggcgtatgaatctcatgctatgagtgggggattgctggatattatcaaggagagccgtcggcgcgaccgtgtaatgggatattcgttgaagggagttcataaagatgacttgattatgcagttgggggattttccgataaagcgggaggggtcacaaggacaaaacaaaacttatcttatcgccttgaaattagctcagtttgactttttgaagaaaacgggcggcaatactactcctttattgttgttggatgatatttttgataaactggatgcttttcgtgtggaacagattgtaaaactggtagccggagatcgtttcgggcagattttcattacggataccaatcgggatcatttggataaaatattgaagaagatagaaagagaatacaaagtctttgctgtagaagatggagaagtgacagaaagaaaggaaatggctgaatgaaacgtaatgatgcggaacaaataggggaaatgattcggaaattcttccggcagaatgctttggaggcgccactgaacgagtatcgtctgatacaggcatggaaagatgtggtgggacctgccattactaaatatacgagtaatctttatattaagaatcaaattctttatgtacatctcacttcatccgtgcttcgtcaagagttgatgatggggcgtgatttattggtgaaaaatctgaataagcaggtcggcgcacaagtgatagtcaatattattttccgttgacaggatggtcttctgctgtttctttggtatccccgaagtttcctgcaatacttcttgtcaggtgcggattttgacggatttttcttatctttctcgtaaagtccgcacttgaagaagtgtaatgtgtaagagtagcttatggaacagttcgtatcacgatagattctatttcaatattccattctcagtccagacttcatccattctccggtcgaaaggttcgacaggcagcttttcgtttacttgaaagttataacatatacctatattataggaatgaagaagaggcagtaatttgtcataatatccttttcctcttcccaaccggttgcctcgggcatcaaaagaaacacccggtataatggcgaggtctatcttctcatacgctgtaaatgcttctcccgtcggttcctctatgtgataagcctcaccggttttcaggttttgcctgcctgtataaatacgaagttccaactcatctcctttgactaccggcagcaaaactgttttctgccggtgccatttttcaacgaagtcatgtgtctgtacttcatcatccaatgaataatagagcaaaacggtacgggccgatgcaaacttgggatgctgttccagtttctcaagcaaagcagcggacttcgttattaattcggtgatgccgtgacggcgcttttcttgcgctatctgcttgcgcagttgtttttttagttccttcatcgcttactttcggttctatgggttgttcgggagctttgggaaatgattcacctttatccaatacttccaatgctttgaggacagtcttgtcgctcttgttcaagtattctatataagcttccatgcccagcatgttataaatgatgtttccgtataaatttgtttcaaacagtttctgtgatttatacatcaatatgttgcgacgttttagccctttgttctcagcgaaacgggcgaattgttccaaaatattctgatgcttcaaatattgcagcaggctttcctctgtttcatatttttgcatttcggcacggtggttgtccgtatactggaaagcaaactggatggtcagtccgcgattaacagccatgcgataataggaagtcatgccggtagtatcctgtggtacaaagatatcgggcataatacctccacctccatatacaggacggcctaaagaagtttcaaagatttggctttgatcctgcttgatactgtcttgtgagaaaaattctccgtgttcgtaacgggtcaggatatccatttcataatttgcgtcattaccttttacatacggtttctgtatgcagcgtcctgacggagtatagtaacgggcaattgtcagacggatggctgaaccatcgctgaagtcgataggttgttgtaccagcccttttccgaaagagcggcgcccgatgattgtcccccggtcattgtcttggatagctccggcaaaaatttcgctggcagaagccgaaccttcgtccatcaatacgacaatgggcattttctggctgcttccggttccgttggatgtatagttctcgcgtggagacttgcgtccctgtgtataaacgatgagtctgtttttgggtaagaattcgtttaccatctgaattgctgcacccatatatccaccggtattaccgcgtaagtcgatgaccactccttcgcagtttgcctgatttagcttggctaatgaaatcaataattcgggataagtcgtttcaccgaatttgtttacttttatgtaaccgaatttgtcattcagcatataggcggcatctacactctttaccggtatgtcaccacgaacaatggtgaaatgtaaagtttctttttctcccggacgaaaaacgccaagttttacctcactgcctttgggacctttcagtcttttcatggattcatagttggtgacaatttttcctacaaaggcactgtcatccacttctatgatgcggtctcctgccatcagacccactttttctgatggtccgccttggatgacattgtttacatggatggtatcttgctggatggtaaactggataccgattccgctgaaacttccttttaaatcagaatttacagcttccaggtcttttgccggaatataagaagagtgggggtccagctcacctagaatttgcggcatagcatcttccaccagttcacccatgttcactgtatctacatattggtcgtcaatgatacgcaacaatgcattcagtttgttggatgaagtattaatgatacctaatttgtttcctgaaaagtggttggcgtaaaaagttccaatcaatattccggttacgatgcttactgcaacgattaccggcataaaacgggatgttcgatttttgctcatatctttatttgctattattcattggaattgatatagattacttcaatatttgcgcgtttcaataaatcaagcccgtcttccaaacggtatttttctgagtaaactacacgtttgattcctgcttggatgatgagtttggcacattctatgcaaggagatgcggtgacgtacatggttgctccgtcgctgctgttgttgcttcgtgctattttggtgatagcattcgcttcagcgtgtagtacgtaaggcttggtgactccgttgtcatcttcgcatacattttcgaatcctgcaggagttccgttatatccgtcggagatgatcatcttgtcttttacgatcaatgctcctacttgacggcgttcacagtatgaattttccgcccaaatactagccatgcggatgtatcgtttgtcgagtttgagttgtttctcttctttcgtttccattatttcagtcttgcttattatgtgcaaattgaatataagtttttttcccttcgggagctagcaataaaacattgctgtcaccttgataaaatattgcattattcaatgcttctatgaactcgttgttatagcttgttgaaggcggagtcttggtaaagtttatgtttactgtccggtcttttccgtccgcttgccatgtgccttcaatggttccattttgtatgcttcctgtaaaagtaccatccgctttgaaagtgatgttgaaaccatgaatgatatccaaggcttttcttccttcggttgcgatagtcttatccggattgtgtgccattgcattgtatttgggctctccgttccgtttgtcccaatttgctttaccatagaaatccactacatgccatgtgccgcttgcaaagatttcctctacatcgtcttcattgttgcaactccataagaaagggagtagcattagtatataaagaatagactttagtttcatattgtttggttttttagttgatgattccatttcttttcagcaaggcatggatactgggttcttgtccacggaagcgtttgtaaagggtcatcggatgttccgttcctcctttcgagagaatattctcccgaaaagaagcagcgacttcctggttgaagattcctttttccttgaataaggagaaggcatccgcatccagtacttccgcccatttataactgtagtatccggcagaatatccccccgccataatatgtgagaactgtacggacatgcaggtgtcttctactccgggcagtacttgcgcttttttccatgcttctttttcataagcgcggacatctccgtcaaatgtttcccggcgggtgtaccatgccatatccagcaagccgaaacttacttgacgcaggcaggcataggccacattgaaattggatgcatctacaattttttggatcagttcggcaggaatgggttctcccgtttgataatgtctggcgaatgtattgagaaattctttttctgtggcgaaattttccataatttgtgatggaagctccacaaaatcccaatatacgctggtaccactcatggttgaataggtggtattggcaaacattccgtgcaaggcgtgtccgaattcgtgtagaaaagtgtttacttctgagaaagtcagcaatgccggtttcccagccgatggcttggtgaagttcatggtaacggatacgtggggacggctgttgactccgttttctatccactgctccttatagctggtcatccatgcgcccgaacgttttccggcacgggggtggaaatctgtataaagtacagccaggaaacttccgtctttgtcgaatacttcataagcttttacatcgggatgatagaccggaatttctttattttctttaaatgtgatgccatacagacgggtagccagaccgaatacacctttctctacttggctcagctcaaaataaggacgcagctcttcttcattcagattgaatttcttatttttcagcttttctgaataataggcccaatcccatggcatcagctggaagtcattgccttccatttcgcgtgccaatgcttcaacttctgccacttcctttagggcggcaggggtataggcatccagtaattggttgagcagtttgtatacggcatcactcgtttcggccatgcgctttttcagtttatactcggcaaaagtggagaagcctagtaaatgagccagttccatgcgaatgtttaccaattgcttgatgatgtccacattgttgtattcgttattgtgtgtacattgggtattataagccatatagacttctctgcgcagtgaacggtcatcacaatatttcatgaaaggaacaaaactgggagcatccaatgtaatgatgctgccttcttttcccttatcctttgctgtttgagcataactttccaatgaactttcgggtaatccttccaattgtttttccgtcaaagccaattcgtagttatttgtttctttcaacagattctgagaaaaacgtaaggtcaatatgcttaattcggtattcagttggcggaacttttcttttgcctcaccggtcaggttggcaccgcttcttacaaaaccatcgtatgtcttttgcagcagttgggcgtcttcacctttcagttgtaactggtctttttgttcgtatacggcttttatacgagcaaaaagtttttcattcagactgatgttgttgctgtgttcggacagtacgggcatcattttttctgccaattcctgcatctcgtcactggtctcggcactcatcaaattgccgaaaacagtagttacgcggtctagcaacgcacctgatttttccaaagcaacaatggtattttggaaagtcggtgcttcgggattattgacaattgcatcaatttcctcattttgttctttcattccttccaacaaggcaggttcataatgttctatcttgataagatggaacggagccgtgtcatgaggggtgttatagggttttaaaaatggatttttattttcagtcatagcactattttatttgacttacaaatttgctaaaaaaaagcatcactatcctcattctatttacttatttaacaaagtatattaaatagttaggttaaaaataaaaaagcacaagcagaaatgcctatgcttttcatttttatggggttttacctgattatttattcttttcagtcagtttttccaacgccggaatggagatttcctttctgctgagttgtaccaatccctgttcctgtaaatcattcagcacttttgacacattgattcgtgtctcatcaatcaaactcgccaaatcctccattttgattttaaggatttttttcccttcgggcttcatggagcgcagcactaaaaaattcagtattttttcttctgtattacctatgtggctgttccataatttttcgtatgccacttgtgctctattactcagaatatttaaatagttaaggcggaagatttcgtagttgttcagttcattcaatacaaataacttgtctatggtaactatgttaatatctgtacgtgctttgtaagtcgctgtatagttggtttgcatgccgaataatgaatagggctctataacgaaaggacttccaaaagtttcaaataaggcgtatgaatgtcggttatcggttgtttgggagattatctccccatttaagagaaagattaattgagtgcaaggtgcaccttgttccacaatgatatcatcggcgttgtatttacgaaaatgtagctttaccttgcctatgatattggtgaagtcatttttacataatccctggaagagagggagttgtaaaagtgtatcatacattgtaatttccataagttctgttgttcgttaagttatagtttaacatacaaaggtaacgataaaacgagatttattatttataggtggaagaacttttattttttttattgtttcttaccgtctcctaatgtttaaaagcagaatacttgcggactgtataaaaaataaatatatttgcattcaaaaaaaggaggagtttatgtttggatcatttgattttcaagaatttttaagtgcgtttattgtgctttttgctgtcattgatattatcggatctattcctattatattgaatcttaagcagaaagggagaaatgtcaatgctaataaagctaccggcatttcttttgctttattgataggtttcttttatgcaggggatatgatgctgaagttatttcaagttgatattgcttcgtttgccgtggcgggtgcttttgttatttttctcatgtctttggaaatgattctggatatcgagatattcaagaatcaaggtcctatcaaggaagcgactttagtccccttggtttttccgttattggctggtgcgggagcgtttactacgttgctttccctacgttcggagtatgctcctgtaaatattgttgtagccttgatattgaatatggtttgggtttatgtggtgttgaagttgacagatcgcatcgaacgtttcttgggtaaaggtggaatttatgttattcgtaagttttttggaatcattttgttggcaatatcagcgcgtttatttactgctaatctgactttattgatagagcagtttcagaaagctcagtaatatgctgtttttttacagataataatgtcggaactcaccatagatattttattggaaaccaactgctttgtgttgaatggatattaatctgtggtgagttccggtatcattccatttgaatggtagctgtttgatattttgatacgctcctttggtgtctatttctcgttgatgatgaatttcttcattccgtctgtaaaataagtttcatatttatctccttcgcctgagcaaataaaataagcatccagttcaggatgtgcttcacaaaatgctttggctgagtccagtcccatcaccatgaaagcagtagcgtatgcatcggcactggcgcaatcttttgcaatgacagtggatgacaggatactatgttgtactggatatccggtgcgtgggtctatggtatgtgcatatttctttccacctttgtaatagaaattacgataattccctgatgttgccatacctacatcactaatggcaagcacagtctgtaactcctggtttactgacaaggagtcatctacaggtttgtttatgccgatacgccaagcgttcattttggaatttttgcctcttaccactacttcaccgcctatatctaccatatagttttttatccctttacgttccaatagccttgctactgcatctactccgaatcccttggctatagcgctgcaatccagcattatacgagggtcttttttcattatccggttgttctgtaaatctattttttgatatcctatcatttggcgtaagctgtccactatcagtgaatccactcctgtagattttttgaatccgaatccccatgcatttaccaaaggtgcgacggtgatatcaaaggctccatgggtttcatcggatattttctttgagagatggaatacatgtacgaaaaaactgtcaacttccgtcttttcattgtggtttacgcgggtgattacggaattcggattgaaaggagagagggagttgtccactttcttcagttcagtttctatttcttctttcagattatcttcggactggtaggtgattttgtatactgtaccgaatacaaagccttcatccgtacggaaaggggcttgcttttttagaataataattgttcctattatcagaattgctagaaacggcaattgccatgctaatttttttttattcatacctgtattttagttaagaaagaaataaatgttctattaaaattttaacgccgataataatcaaaaccaaacctccccataattccatgcgcaggttgaaacgcttgccgcaaaatacacctatcagacttcctaatgttgagataacaaaagaggtaaagccgatgatgacaataggagaaagaatagaagtgaaagagtttattcctacaaaagcaaatgatataccgatggccaaagcatcaatgctggttgctatagccagcgtaacaaccacttttaatttagtggggtcgaagcagcgtttgtcttcattgctgaagctctcttttatcatacgccctcccaaaaaggccaataacccaaaagcgatccaatggtcataatcctctatcaggtgactgaatcggctggcggcaaaccagccgataagcggcatgacagcctggaaaaggccgaagaagaatgccataataaaaaaagtgcgccagcaaatgcgacgcatgataattccgcttgttatggaaactgtgaaacagtccatagcaagactgatggcaaggagccatatttctaaagttgtcattggttaaaatggtaatttgtatattaaactgtatgttactcctaagttagtcgagttgttttttccaaaaccgggaatataccaaggctcggtgtgttccgccttttttatgttcatgcgtatacggtaacgtagtgaccatcccatgtagaaattcttgtacacatttacctttattcctgccagcagttctgcccaggttactgtggttttaattccgtcataactgaaaggtatttcaggaaatccccatgtaggatccttcattgtcggagcatctacatcgtatgaaaaagaggtgaatccgtaacgtatgcctccatatagaaaaccaggcagatagggcttcttgaaaaagaagttgtagttcatgcctatgcggaaataaggagctgaggctttataatgtatattggtaccatcatcagtagtgtcggtggttccatatccaatttcagctacggggacataacggtttttcaaattgacctccacgctgatttctgtacttgtaatgtcacctccaaaaattttgcttcctaggccaaatatatctacaccgatagtagttccctgatagaagggtaccttttcttcctctatggttgtttttttttcttgtgccgccagtgtggggctgtacaacagcatactactcagtagcgttaacaacgtaatatatgttgaaattctttttttcttcattattgatgtccgaatttacaatctcgatagattttaggttataggtggtgtatttaatgtcttccactttataaaacatcatggtgccacattctatattctgcaagtaggggatattctggtgaatgagtgtgatagtgtcacgcatcttttccgtataatgcaatacgtaggtagtttttgatgtataactcaaaggcaggctcatactgctttccgctttattgaatatcgtgtcattcatcaatgagtcttttactacggtttccttaatagttccatcttccagtgtgtcacgtacaatcacatcggtagtgataaatccagtgacgtcaaaagccggactgaattttacagcttggtgtgtctctgcatccagaaagtcgaaatgggcaaaggaattggtggtaagcggacaatcgctttccccacagctttgcatcaaggtgcttacggtaatcaggagcaataagataatggctggtagtttcttcattttaaaactctttctctattttataattattgcgttcaggagcattccgggctatcaattctcctatgaatccagccagaaacagttgggttcccaaaatcatcaaagttagggccagatagaagtaaggagaatcagtaattaatatataaggtaaaccatgtgacaaggcatatagtttgttcgctccgatgataatgacggaaatgaaaccaagaataaacatcaatgatcccataaacccgaagaagtgcatcggcttgataccgaatttggataaaaaccacagagtaatgaggtctagataaccattgaagaaacggtttaatccgccgaattttgttttaccgaattttcgtgcctgatggtgtactaccttctcggctatcttaggaaaacctgcattctttgccagataggggatatagcggtgcatttcaccgtatacttcgatgttctttacgacatcacgacgataagcttttagtccgcaattgaagtcgtgcaggttcttgatgcctgaaacggcacgtgctgtggcgttgaatagtttggtcggaatggtttttgataacgggtcatagcgtttttgcttgtatcccgatactaagtcgtagccatcttctgtaatcattctgtataattccggtatttcgtccgggctgtcctgcaagtcggcatccattgtaatcaccacatcaccttgcgccttttcaaaaccacaatacaaggcaggggacttgccgtagttccggcggaatttgataccttttacgttgtccgactccgagcgtagtttctctatcacttgccaggagtggtcggtgctgccgtcattgacaaaaattacttcatagctgaaacggttggcatccattacacgttgaatccatgcgaatagttccggcaaagattcttcttcgttatacaaaggaataactacagatatatccatcttttattcatttttctttttacgcatcacgatcaatgccgtagggatagccattagcatcccgtaaaacatattttgtgatatcagttgaaatgtcatttccagcggggtaagtcccgacagtaaatctatcgcttcttcgaattggttcagtgaggttgtcagttcggttccggcagtttctttgaactggtttaagatggaacggtatgcctcgaatacgaatccgccatctatatagcggaagtagatgtaatgcactaccgctacaaatagagaggcgaacatatacataaaggtagtgaatagaaacgcacgtgaaaaagtgatgcttccgtcacaatgccgttctctgaactttttggcaaatatgtatcctaaaaagggtactcctatagtcaggactataaaaagtaattgtaggaaaggtattctcaatcctaacgggaagagcatgaatttgaaggcccataaaagacccatgcccgtaccatagcgcatggcgcattcctgcaaagtcggtttataattcgtcattctttattaataagtgcacaaaagtacttcttttacgggaatccgtcctatagttatgggtgaaaaatgtattttttctgctaaaatcaaaaaaaagtattcgaaagtattgtagttttgaaaataatgtctacctttgcactcgcaaaacaaaaatgggtaagtcctatacggccagctcctgatgaatcctccagggcttgatcgcagcaaaggtagttggttgtagcggcgcgatatagtaagcttacccacccccgcctctttagctcagttggccagagcacgtgatttgtaatctcggggtcgttggttcgaatccgacaagaggctcggaaaagcgagaaggacgaagaaatcttcattcttctcgctttttttattatatttgcgctgatattagttttaaggttggtacaaccgttatttaagagttcttttttatgatagagtcacagattgtggcaagagtattgccgtctaaatgccgtgaagcggtaaaagtccttttgcaggaagtgtacggatatgaagatttccgtaatttagaagtttatgatgacttgttcagaggtaaggaaaaattgcaattgtctcaaggacaattaattgaggaggtcattatggaagccgaaaaagggatcaagggtgactcgtctgctcataatttgctcctgacagctccgaccggagccggaaaatcattgttgtttcagctccctgccatttatctgggtaatgaatataagcttcttactcttgtggtttctccgctgaaagcattgatagtggaccaggttgaggcgttgcaggagttaggctatgaacgtgtggcgtatgcttcgtccgatctttcacctgaacaaaagaacgaagtatatcgtcgtgtccgtgaaggggaggttgatcttttttatctttcccctgaattattgttggcgtatgatatcagttattttgtaggtgaacgccgcatcggactggtagtggttgacgaggctcataccgtgaccacttggggtaaagagttccgggtggattattggtttctagggcgtcatttggaagctttaaagaatgcgttggggtatgtattccctgtttttgcattgacggccactgctgtgtggaatcccgaaggcgggaacgatatgatttttgataccatccggtcgttgcatcttgctccgtgtgccttgtatgtgggcacggtgaagcgtgaaaatatcggctttgacattaccgccatgaccatagaggagggggaaacctacgataaggccaagcaacgtactgttgccgcccgggtggaggattttctggacgggcataagactatcatttattatccttttgccggaggtatagatatgaaactgaagacctgggtgtatccggctaactggcattgggtggcatcttattatggtaaaaaggataaagagcaaaaagccgaaattatacaagcttttaaggagggtgagaaaaaaataatcgttgctacgaaagctttcggtatgggggtggatatcagcgacattgaccgtgtgtatcatgtggctccatccagcacctttgtcgattatattcaggagattggccgtgctgcccgtgataagaacattacgggtgtggcggtgacggattttaatgagcgcgacttttattatatgaaacgcctgcattctgcgggtgccatctcccaggaacagttggggatgattctgaagaaagtttgggaaatatatctgatgaaaggctgtagtgatgaaatgcagatgtctttatccgattttgaatttgcagtgaagctgcctcgtaaaaagaacaagctggaatatgaatcggatttggagcaagtcgtcaaaacggctttgttatggatagaagaggatttgagtttccggcatggcggttctcctgttgaaatcaattcacagacgttgttttccgatggctatgtacaggaaaagacgggtgatgccgctttccgtaaaaaatacaagcagtacatggttcccgtgaaaggggttgaaggagtctataaggtggcttttgaatctttgtgggagaattgtttctcggagatgggataccgtgagtttaagcgcgatttatacaatggaaatctctttgagggagttcgtgcggcagctgtgggcaagcatgatgtcttgttaaaagagagtgcggcggatatctgctccaagctggcaagtctcttgaagagtttgaaagatttgttgacggtgagtctgtatggtaataaaggaaagttcgaggaggacgatttgcgtagtatttttgcggcgtatgatatggatgttccttctgccaagcgttttatcacttcgttactggagtccagggtagaggagggcagaagtgtgagttacatcaccagtgccaagaagaaagatgaagacaaactgatgtttaccgttacccgtggttttgatttgttattgtcccgttaccagaagttgtgtgcccagcgtatcacaggaaagaaaggagaccggctgttgttctatgtcactccgttctccgatctcaatatgctgctcaacttgctgtctatgctcaatgtggtggactttaccgtagaggggggtgttccttctgttggagtacgtgtccgtgatgcggagatattgaaaaaggaagctgcttcgggagactatcagaaccatgtgctggagaataatgagaaaatattccaggaacagatagagttgttccggctgttctttggcaatacgaagttaagtgatgagcagcgatgggagtttatagaggattattttacggggatgagtttggagggattgaaagaaaaatattcttgtgttgtggaatgacagctgtaagggctgtataatataactcgttggcgaaattaattttgccttgtatgatttcacgttagtatatgaggttgtgccaacgttttgacacgacctctacttgatagccgacaacatgggcattcatgacaaaattcacttgaaatgaatttgttttccaacttttattgttaatgcgaagagaacgactttgacgaatgatactctttatttggctggtacgcgcaaagtcacggaagttggaatcagcctcttgtcggcaaccatgacggtggaggaacgggaagacaatgttgtgataattgatcatcgtttttgtttttaaagggttgttattatcagaaaagtgtcaggaaggaacaaggcgcacactgctgcggcgtccggtgaaacttggtacaagatccgcggaatcttgtaccaggatttttgtaatcttgtgccggggtgcggttggttccctctgacactgcaaagataacttcacgtccgtgcggcgtgaccccttccgaccccttttgatcccttggcggattgcggggggaatcatggctctccaagtggaggcagactagttgcaactggcagcggggacacggggacagtggggacagcccctttttttctcacacacacgtgcgcgcgtataaagccggggtcagctcttgtgatacgttccccctaccgtccacactcatcggaccccttgcttggtgaaccgtttgggccgccttttcctggtagtaggttttcatcgcctttttcacctcggtgcgtatacgaaggtctgcatgcagggggcctcccaggagcagtgtgttgtgttatttggtttttttactgtaagagatgattttctctagcagttccggccatatgtcgtcctgtggaaaggcaggcagggggaaataaggttcggagccttcggtgagttgttcttcctcgttggtgtcattgggaaactcatttttcaccttattatatcgcgcgcacgtgtgtgtgagaaaaaaaggggctgtccctgctgtccccactgtccctgccttgtaagaatcggcggaactgaataacggaaaatatttttcaggaggacttgtctttaaaattcacttgaaatgaatttgttttcccacttttattgttaatgcgaagagaagtcgttatcttcgcattaacaatccatttaagaaaaagagaatgatgaaatatcccattggcatacagagttttgatcaaataatagaaggtaattgggtctatgtggataagaccgatttggtttatcgtttggtaacgacgaccaaaacttgttttcttagccgtccccgtcgttttgggaagagcttgttggtaagcacgttggatgcctatttcaaggggcgcaaggaactttttgacggcttgatgatagcgaagttggagaaagactggcatcagtatcctgtgttcaagatagatttcaacggtgttaactttacggaaaaaggaaacttggaagctaccatagaatattatcttgccaactgggagaaaatctacggagaaactccccgtgaggttcctatggggaagcggttcgaacaaatactttctctagcctatcagcaaacggggcgtcgtgccgtggtgctggtagatgaatatgacaagcctattctcgatgcattggatactcctctggaagatgccaaccgcgaaatcttgaaagctttctattccaccttcaaaggggctgatgaatacttgaggtttgtgttgcttacgggagtgacaaaattttcgcaagtcagtgtgttcagcgggttcaaccagcctaaagatataagtatggataatcattatgaagcattgtgtggtgtgactcaggtggaattggaacattattttgcagaacctattgcaaatttggctgaaaagttcaattatacagtggaggaaatgaaagacgtactcaaaatgcaatacgatggctatcattttggcagcggcttgcttggtgtctataatcctttcagcctgctcaatgcttttgatatgaacgatatccgcgactattggtttgcatcaggtactcctacttatttgatcaaacttctgcggcataaccacgagcagatggatgaattgactgggcgttactatgatccttcgatgtttgtcgattataaggccgatgtggaaaaaccgctgcctatgatttatcaaagcggctatctgacgatcaaggaatacgactcccggagaaaccgttacctgttggactttccaaataatgaggtgaaaaagggatttctgaccatggtggcagccaattatttcaaaccccaagagtttgaagtttccaactggattgtagatgccgtcattttacttgaggaaggggaaactacggctttttgttcagctttaacttctttccttgcggatataccttatgattctcatggctcgataaagacggttgaagcgacagaaaaacattttcaatatactttctatctgattctccgtttgcttggggtatattgccagttgcatgtggagaaaactcagtcaagaggaagagtggactgtgtattggagacaaaggattatgtatatatatttgagtttaaactggatggtacggctgctgaagccttgcagcagatagaggacaaaggatatgctacaccttatcagacagacacgcgcaaagtcacggctattggtgtcagtttttcatcggaaaccatgacggtggaggaatgggaggaaaaacgttgtagcccagttgagattaaataatagtgcaaaagtaatgcctcaagccggaatcatcacgatccctcttgaggcagtcttcatttatggaattgggaatataaaccgcttacgctttaaaattgcgtgctatttttttatatccatatacggcacggttacccaattcttcttcaatgcggagcaactggttgtattttgccatacggtcgctacggctcagtgaaccggttttaatctgtccgctattggtggctacggcgatatctgcaatggtagcatcttccgtttcaccggagcggtggctggtcacagtggtgtagccgttacgttgggccatttcgatagcatccagagtttcagtcagcgaaccgatctggtttacttttaccaggatagagtttgcacaaccttcactgattcctttttccaggaacttcacattggtaacgaacaagtcatcacctaccagctggcaacggttgcccagacgctcggtcagcatgcgccatccttcccagtcgttttctgccataccatcctctatcgaatcaatggggtagtcccaactcaatttttccagataggcaacctgttcggcggcactgcgcttttcccctttggggccttcaaacttggtatagtcatagatgccgtcatgataaaattcggaagaagcacaatccagaccgatggtgatatgtttgaacggttcatatccggcagcttcaatagcggcaaggatacaattcaaagcatcttcagtgccatccagtgcaggggcaaaaccgccttcatctcctacggctgtgcttagtccgcgttttttcagcacctctttcaaagcatggaatacttctgcgcccatccgtaaggcctcacggaatgtctttgcgccgacaggacgaatcatgaattcttgaaaagcgataggagcgtcgctatgcgagcctccgttaatgatgttcatcatcgggacgggcatgacataggtatttgttccgccgatgtatctgtaaagagggatatccagatagttggcggcagcttttgccacagccagggatacgcccaaaatagcatttgcgcccagttttgatttagttggggttccatccagatcaagcatggctttgtcaatgccacgttggtccatagagtccattcctttcaatgccggagcgataagggtatttatattttctacagcttttaatacgcctttgcccccgtaacgggtcttgtcaccgtcacgtagctccaatgcctcatgttcaccggttgacgcacccgatgggacagaggcacggcccataatccctgattccaatatcacatccacttccacagtggggttaccacgtgaatccaaaatctctcttcctttaatctctgctattttcatataattctaattttataagatggttttattttaataacaatagagaagccggatttgttgaggtgccagggaaagttttttcatgatatttacttttttatttctttccacagagtacatccgtcttcttttttcgtctccctttaataaaagctagagatcaatatgaaaataaaatggatagtgggggggctgttatgggcaagttcttacttgcaggctgccgcacaggaatataaactgtggtatgacgaacccgctcaggtttggactgaagcgcttccgctgggtaacgggcggttgggagcgatggtattcggcaatcccggtgtggaacatatccagttgaacgaagaaactatttgggcaggacgtcccaataataatgctaatcccgatgcgttggaatatattcccaaagtgcgccggttggtgttcgagggaaaatatcttgaagcacaaacgttggctaccgagaaagtaatggcgaagaccaatagcggtatgccctatcaatcgtttggcgatctgcatatttcttttccggggcatacacgttattccgattactatagggaactgagcctggattcagctcgtaccatcgtgcgttataaggtggacggggtgacttatcagcgtgaaacactgacgtcgtttgccgatcaggtagttatggtgcgtcttactgccagccaacccggaaagattacttgtaacgccaatcttactactccgcatcaggatgtgatggttgcgacggaaggggaggaggttaccctttcgggcgtatcttcctggcatgaaggactcaaagggaaggttgaatttcagggacgtatgactgcacgtactcagggaggaacccggtcttgtcgtgacggagtcttgagtatagaaggggcggacgaggctgtgatttatatttccattgctaccaactttactaattacaaggatataacaggtaaccaagtggagcgtgcgaagaactatctgcgccgggctgtaagtaaagattatgtgacatcacgtaaggcacacgtcgattttttcaagcaatatatggaccgtgtctctttggatttaggcatagacaaatatgcaggggtaaccactgatatgcgtgtacagaatttcaaggaaacgaaggatgattttctggtggccacttatttccgtttcggccgctatctgttgatttgttcttcacagccgggtgggcagcctgctaatttgcaaggcatttggaatgataaattatttccttcctgggatagtaaatacacgtgtaatatcaatgttgaaatgaactattggccggccgaagtgacgaatctcagcgaattgcacgagcctttgatacaactgatccgtgaagtgagtgaaacagggcgtgagtcggccaagattatgtatggggcggatggctgggtattgcatcacaatacggatatatggcgtgttaccggagctatagacaaggctccgtcgggattatggcctacgggtggagcctggctgtgccgtcatttgtgggaacgttatctttatacaggcgatatggaatttctccgctcggcttaccctatcatgaaagaagccggtaagttttttgatgaaatcatggtgaaggaaccgttgcataactggttggtggtatgtccgagcaattctccggagaatactcatgcaggcagtaacgggaaagcgactacggctgccgggtgtactttggataaccagctgatattcgatttgtggaatcagataatcacgaccgcccgtctgttgggtacggatgctgaatttgccacccgtttggaacagcgtttaaaggaaatggcgcccatgcagataggacgttgggggcaattgcaggaatggatgatggattgggacaatccgcaggatgtgcaccgtcatgtgtcacacctttatggtttgttccccggtaatcagatttctccttaccgtactcccgaattgtttgatgcggcacgtacttcgctgattcatcgtggcgatccgtctaccggatggagtatgggatggaaggtatgtttgtgggcccgtctgttggatggtgaccatgcttataaactgataaccgatcagttgactctcgtacgtaacgagaagaaaaaaggaggaacttatcctaatttgtttgatgcccatccaccttttcagattgacggtaattttggttgtacggcgggtatcgtagaaatgctgatgcagagccacgatggttttatttatttacttcccgcattgccggcgcaatggaaagagggaagcgtgaacgggattatagctcgtggaggttttgaattggatttgagttggaagaatggtaaagtgagccggttggtggtgaaatcccgtcatgggggaaactgtcgtttgcgttctttaaatccgctggcaggcaaagggctgagaaaggcaaaaggagagaatccgaataaattgtatgccatacccgaaatcttacagccgattataaataaagaagcgaaattgaataaagttgagttgaaaaaaacttatctttatgatctggaaaccaaagcaggtgaagagtatatattcttaggtaagtgatgattcttgcattgattgtaaggatgaaaaatagtaaaaagaagaaatatgaaaagaacaggattaaacattatttgctcattgttgctggcaggtggaatgtgtgcatgtactgccactcctaaacagaccgaagaaatcaaatggagcgaacgtatggctcagtcggaaatgcaacgtttccctgagccttggatgatagaaaaagcgaaaaagcctcgttggggctatacgcacggactggtggtgaaatccatgttggaggaatggaaacataccggtgacactgcctattataattatgcaaaaatatatgcagacagtctgatagacaccgacggtaagataaagaccatgaaatatctttcttttaatattgataatatcaatgccggaaagattttattcgatttttatgaaaagacgggagacgggcgttataaggtggcgatggatactcttcgcaaacaactggccgaacagccccgtaccagtgaaggcggtttctggcacaaactggtatatccgcaccagatgtggctggatggtatattcatggcttctccttatctggctcaatatggtaacgtattcaaggatactacggtcaatgccgatattgtgaatcaaataaagctgattgcccgtaaaacgtatgatcctaaaaccggtttgttctatcatggctgggatgagagcaagacacaaaattgggcaaataaggaaaccgggtgctcacccaacttctggagccgcagtataggctggtatgccgctgccgtggtggatgtattggactatatgccggcgcagttcgaaggacgcgacagcattatgacgattataaatacgttagccgaaggcattgtaaaataccaggagcctgaaacagaggtatggtggcaggtgactgaccagaataaccgtaaaggaaattatctggaatcttccgcttcatcgctttttgtatatttcttgtgtaaagcggtgaataaaggatatattcctgtggagtataaagcggccgcagagcgtggttttaatggcctgatcaaacagttcattaaagaagagcctgatggttcatacactattaccaactgttgtgctgttgcaggattaggcggtaaaggaaaccgggatggaagttttgcttattacataggtgagccggtgatagagaacgatccgaaatcagtaggttcctttattttggcagctattgaatatgagaaaatgaagcagtaggaataatctgaaaaagatgaggacatttgtcaaaaaggtcttcatcttttccgtaaacataaggaccttttttaaacaccttgttgttttgataaaagctcttgtttggagattgtcaattaattaataaacgaatttgaaaatacaatgatgaacagacacgcattactttccttattggctttattgctatgttgctctacttcgttgccggcgcagaaagcgaaaacgtatattccctggaagaacggcaaactggtggtgtccgaggagggacgctacctgaagcatgaaaatggagtacctttcttctggttgggtgaaaccggatggctgatgccgcaacgcttgaatcgtgacgaggtttcttactatctgaataagtgcaaggatgctggatataacatggtgcaggtgcaggtattgaacggtgtgccttccatgaatatttacggccagtattccatgacagacggttttaatttcaaagatatcaaccgcaaagggatttatggatattgggaccacatggactatattattaaaagtgccgcttcacggggcatctatatagggatggtatgtatttggggaactcccgtggaacaagggctgatgaatgaaaaagaagccgtggcatacggtaagtttcttgcagaacgttacaaggatgagccgaatattatttggatgataggaggggatatccgcggtgataataagacggaggtatgggatgcgttggcaaacagtatccgcagcatagacaaaggtcatctgatgactttccatccgcgtggacgtaccacgtcggctacttggtttaatgaccgcgaatggctggatttcaatatgttccaaagcggacaccgtcgttacgggcagcgtaacggtgatggtgactatcccatcgaagagaatacggaagaagataactggcgttttgtggaagccagtcaggcaaagactccgttgaaaccggtgattgatgacgaacctatttatgaagacattccacaggggctgcatgatcccaatgaaacccgttggaatcagcacgatgtgcgtcgttatgcctattggtcggtatttgccggatcattcgggcactcatacggtcataatgatatcatgcaatttatccgtcccggatatggagcctctttcggtgccgacggacgtaagaaagcatggtgggatgctttggaagaccccggtttcaatcagatgaaatatctgaagaacttgatgctgacttttcctttctttgaacgtatgcccgatcagagtgtcattgcaggaactaacggcgaacgctatgaccgtgccatcgctacccgtggaaatgactatttgctggtttacaattactcaggacgtcctatgcagatcgatttgagcaaaatcagcggtgcgaaaaagaatgcatggtggtatagcgcgaaggacggtaagttggaatatatcggtgagtttgacagtaaagtcactcctttccagcatgatagcggttatctgagcggtaatgaccaggttctgattgttgtggattctgcgaaggattatgtgcagaaagcttggacagccttgccggatgccatacagaaatggaataagtaagaaatatgcatatcatgaaaaaacaagtattattaatcattcttctggcacttccgttgtggttgaaggcagcggatgtttcggttaccggcctgcgtaccgagcagatggtagaccccatggggttggatactgctgctccccgtatgagctggcggttggaatcttctcaaagaaatgtgatgcagaccgcctaccggatcttggttgcgtcttctcctgaacttttagcacaggataaaggagatttgtgggattccggaaaagtggaatccgatgcgtccgtatggattccctatcaagggaagcgtttgaaaagcaatcagcgtgtttactggaaagtgagaagctataccaatcgcggtgagacagaatggagcgagcctgcccgatgggggatgggacctttaggtgagattcattggaaaggacgatggataggttgggacgctgcgtttgcatgggatcgggaagattcacacagccgtttgagctctcgttatttacgcacggaatttaaaacgcaagccaaggagataaagtatgctacccttcatttgtgcggtttgggtatgtacgaactgttcattaacggtcagcggataggtgatcaggtattggcgccggctccaagtgattatcgtcgtactgtgctttacaattcttttgatgtcaccaaacaggttgccggaggaaatgccgacaatgccatcggagtgaccctgggcaacggacgtttctacactatgcgtcaaaattacaaaccttataagattcctacttttggttaccccaagttgcgtctgaatctgattatagaatataccgacggcagtatccagcgcatcaacagtgatgagaaatggcgtttgacggctcaagggcctatacgtagcaataatgaatacgatggtgagatttacgatgcccgtatggaattgggaaactggacacagcccggttatgatgattccaaatggctgaaggcgcaacgtgtttcattgccgtacggtacactccgcggcaataccgctcccaacatgaaagtgatgaaaacgctgaagccggctgtcttcaagcaatatggtgaccgttatatgattgatttcggtcagaatatggcaggatgggtgcgtattaacatagcgaaagccgctgcgggagatacgatttgcatacgttatgccgaacgggtaaagaacgacggtacggaactggatgtggaaaatctccgccatagccagagtacggattattatatctgcaacggtaaagaaaacaacacctcctggagttctcgtttttcttatcatggattccaatatgtagaagtgacaggttataaaaatctgaaagcggaagatttggttgctgaagtagtatatgatgacttggaagataacggtactttcgagtgttccaatgatatcatgaaccgggtttatcggaatgcctggtgggggatttccagtaattataaaggagtgcctttggattgtccgcagcgtgacgagcgccagccctggcttggcgaccatgctatgggaacgtggggggaaagtttcatgttcaacaatggcaacacctatgccaaatgggcggatgatatccgtgaagcgcagcgtgaagacggttgtattcctgatatttgtccggcttattacaattattatacatcggaaatgacgtggtcgtccacattcccggtaatctgtgatatggtttatgaacagttcggcaacatcgaacctattcgtaagaattatgccgctatcaagaaatggatgcaccatatacgcagtgagttcaccacagaggatggagtgattaacgccgataaatacggtgactggtgtatgcctcccgaatcaccggaattgattcacagtcaggaccctgcccgcaagacggatggagcactgattgctacagcctactattacaaggtatcgcaaatgctggccaagttcgcccgtttgcaaggtctggaagatgaggcgaaaggattcgagaaggatgcagcaaaaatcaaagactgcttcaacgcccgtttccttacggttaagaagggaacttctccggtacaaacgccgcatgttctttatcccgacagcatattctatggtaacaatacggtgacggccaatatcctgccgctggctttcgatatggttcctgaggcttatagggaagaagtggagaaaaatgtaataacaggcattatcacccggaataaaggtcatatcagcagtggggtgataggtatgaactggatgatgcgtgagcttacccgtatggggcgtggcgatgttgctttcctgttggcaagcaacaagacttatcccagttatggctatatgatagaaaagggagctactgccatttgggaactgtggaacggtgataccgccaatcgttggatgaacagttgtaaccatgtgatgatattgggtgatctattgacttggtatttccgtgatttagccggatttaatccggcacagcccgcttacaaacaaatcatccttaaaccggatttttccatccaggagttgagtcatgtcaaggcttcgcacaacactttatatggcaagatgattagtaactggaagaagacccttacgcatctggaatgggatatcacggttccctgcaataccactgcattggtttatcttccaacgttggacgagaaggcggtaaaagacaaggacgttacctttgtacgtcgggaaggcaactctaccgtatggagtgttccttcggggaactatcatttttcggttagcatggacccttcttcaggtaaaaaccgtgcaggtatcgtggaagatcagttcctatacgaacaagcttcttttcccgaatgccacggcgctactattgtggaattgaagaacggagacctggtagcctctttctttggaggcactaaagagcgtaatccggattgttgtatctgggtatgtcgcaagccgaagggtgcgacggaatggagtgcaccttatctggctgccgacggggtgtttagtctggatgatccgcaggctgtcttggcaggcattacggcagaatccactccggcggatgccggccccgtggcttctacgtttaaaggggacaagtcccgggcacgccgcaaggcttgttggaatcctgtgcttttccagatccccggcggagatctgatcctgttctataaaataggattgaaagtagccgattggagtggttggctggtacgttctaaagatggtggaaaaacttggagccaacgtgaaccgttgccaaaaggtttcttaggtcctattaaaaataagccggagtatgtggatggccgtatcatttgtccttccagtacggaaggcgatggaggatggcgtatccattttgaaatttcggatgataaaggaaagacttggaagatggtaggtcctgtagaggcggaaatgagtgtgcctacagctttgcgtaaggcaaatgcggccaatgtagacgatcaggaaggcggtgaagccataaaaggagaaggcgagaagcctatttatgctatccagcccagcattttgcgtcataaggatgggcgtttgcaggtactttgccgtacacgtaacgcacagattgccacttcatggagcagtgacaacggtgaaacatggagcaaagtcactttgcttgatgttcccaataataattcgggcacggatgccgtaaccatgaaagatggccgccatgtattgatttataatgatttcagcacattgccgggtactccgaaagggccgcgtacaccgttgtgtgtggcggtttcggatgatggcattcactggaagaatgtaatgacattggaagacagccccatcagccagtattcttatccgtccatcattcagggcaaggatggcaaactgcatgccgtatatacctggcgccgtcagcgtgtggcttataaagagttggatttgagcaaactgaaataatacaattgtggataaaggaattctttgatagagagtattggagaatttgaaaaaaacgggtgtctgaaataaaaatcagatacccgtttttttgaaaacagactcccattatccgccaatgaaagctctttctaaagatacagaatatgaaataattataaatagagtacaaacgtttcttattatcgtcctccctttataaagaaaagaataagtgacagattattatgaaaagcattagactactacttttactggcttccggagtaactacgggagcatttgcccagtcgggcgggctgacggatatgagccaaagtcgttttgccaagatggccaatacggaattaggtgccgtgcattggacagatggcttttggggcgaccgtttcaatgtatatagccatacctccttgcaaagtatgtgggatacatggaacaatcccgatgtttcgcatggcttccgtaactttgaaatagctgccggtgtttgcgagggcgaacattggggacctccctttcatgacggtgatatgtataaatggatggaaggggtggcttccgtgtatgccgtcacgaaagatcccgaattggataaactgatggatcacttcattgaacatgtggtgaaagcccagcgtgcggacggttacatccatacccctgtcatcatcgaggaaaagaataaggggattgacactcattcggacaaacagcaacagacggtaattggcaccaaagtaggcggtgaggacgagaaaggtgcatttgccaatcgtctgaattttgaaacctacaatttggggcatctgatgatggcaggtatcattcatcgccgtgccaccggaaagactactttattcgatgctgccgtaaaagcgacggacttcctctgtcatttctatgaaaccgcttctgcggaactggcaagaaatgccatttgtccctcccattatatgggcgtggtggaaatgtaccgtgctacagggaatccccgttatctggaactttccaagaatctgattgatatccgtggtatggtggaaaacggcaccgatgataatcaggaccgtattccgttccgtcagcaatacaatgcgatgggacatgccgtgcgttccaattacctgtatgccggtgtgaccgatgtgtatgccgaaacaggagaagaccaactgatgaaaaacctgaccagcatctggaaagacattgtgacccgcaagatgtatgttacaggagcgtgcggtgcgctgtatgacggcacttcgccggatggaacctgctatgagccggacagcattcagaaagtacaccaaagctatggccgtccttatcagttgcctaatagtacggcgcataacgagacctgtgccaatatcggcaatatgcttttcaactggcgtatgctggaagtgacgggcgatgccaaatatgcggatattgtggaaaccgccctttacaacagtgtgttgagtggtgtcagtctggatggaaagaaatatttctataccaacccgttgcgcatcagtgcggatttgccatacacacttcgctggcctaaagaacgtaccgagtatatcagctgcttctgttgtccgcctaatacgctgcgcaccgtttgtcaagcccagaactatgcttatacggtgactccgaatgcggtatattgcaatttgtatggagcgaatacactggctacaactttgaaggaaacgggaaagatcgggttggtgcaagaaacggagtatccgtgggaaggtgctgtgaaactgactgttaccgaagctccgaaaccgtcaaagaagaaagcgttttctttgttcctccgtgttcctgactggtgcgagaaggcaactttgaaggtaaatggcgaaccggtgcaaggaacctggaaagcgaatacatacgccgaggtaaaccgcatctggaagaaaggggattgtgtggaatgggtgatggatatgcctgtaaaattgctggaagccaatccgttggccgaagaaatccgtaaccaggtagtggtgaaacgtggcccgttggtctactgtctggaaagtatggatatagaaggcgggcataagatagacaatgtgctgatacctgccgatatccggttgactccgaaaaaaataaccatcgaaggcagtccgattgtcgcattggatggtactgcccgtctggtcgatgaagtatcatggaaagataccttgtaccgcgaggtaggaaaggccgacaaaccggtccatatccgtctgattccttattatgcatggggaaaccgcggaaaggctgaaatgacggtatggatgcctttggcacggactaatcactaaccacttacccctaatgatttacaaatgaaaaaaatattcataaccactgccgcgctgctgatagcttgtacactgtcagcagccgatttgttcgtatctccggaaggcaatgaccggaatccgggtaccaaagactctccgaaagccacccttacagccgcattgcgtcaggcaagggaacttcgtcgtcttaatgatgaaagtgtaaaaggtggcatcaccatccatctggaggcaggtgactatcatctgtacgaacccgtctttatccgtccggaggacagcgggacggaagcttcacctaccgtcatcacttcggatggaaatgccgttctgaatggtggggtggaaatcaggaactggaagaagcaaggaaagttgtgggtagccgatgtccctatgtttaacgggcgtccgctggatttccggcaactgtggatcaatggacaaaaggctgttcgtgcaagggatgtggcagactttgaaaagatgtatcgcatcatcaacaacgatccccaaaacgaaatactgtgggtacctgccgctgctgtaaagaaaatacagaaggcccgatatgccgaaatggtccttcatgaaatgtggtgtgtggcaaatctccgtatcaagtcggtagaaatacagggagacagtgtcgccgtgcgtttccatcatcctgaaagccgcatccagttcgaacacccgtggccgcgtcctatggtgaccaaggatggtcacaactcggctttctatctgaccaatgccatggaattgctggatgaacccggcgagtggtatcacgacattgaaagccgtaaaatatattattatcctcggaaaggagagaagataagcaaagccgtagttcccggcatcgaaacgttggtatgggtggaaggaacgatagaccgtccggtaaagcacatccgttttgacaatattgctttccaatataccacctggatgcgtccctctttgcaaggtcatgttcctcttcaggcaggtatgtacatgacagacggatataaaatccgtccttccatgattcgtaagaacaatcataagctggataatcaaggttggttgggccgtccggcatcggcagtcgtagtcaaggctgcctgggatattgatttcgagaagtgccgtttccagcatttgggctctacaggcattgattatgaatgggccaccgatggaggacatataaacggctgtctgttccgtgatattgccgggaacggtattgtagcgggcagtttcagccctgccgctcacgaaacacatcttccatacgatcccgccgaccgtcgtgaggtctgtaccggactgaccatttccaacaactacatcaacgatgtgaccaatgaagactggggcactttgggcatttgcgccggttatgtcagtgatatcaatatcgagcacaatgaaatcagtgatgtatcctattcgggcatcagtctgggatgggggtggacacgtacagtaaactgtatgcgcaataaccgcgtgcacgccaacctgattcatcactatgccaagcacatgtatgatgtagccggtatttatacattaggttcacaaccccatagccggattacggaaaattgcgtttccgatatattttcacccggttatgcacacgatcccaatcattggttctatctttacaccgacgaaggatcttcatttatcaccgtcaaggacaactggacggaaggagagaagttcctgaagaacgccaacggtccgggcaatacatgggaaaacaatggtccgatggtgaacgacagcatcaaggcaaatgccggactgcccaaagaatatagctatttgaaggaaaaataaaacgtgataccattatgaaaaacaaacttgccactttagtcggagcacttgcattgagtgccgccgcctccgcccagacctggatctggtatccgggtgattatgagatatggctgggcaaccggatgaacaaccgccgtacggaacgcggtgcttttttccctcccttctggaaaacggacagccattatgtggtagtggaattcagcaagaaattggatctggcggaaccggaagaaatcttcattgccgccgaaggaaaatacaatgtgaaattggacggcaaactgcaattcggtatgccctccaccttgaaactccccgcaggaaaacacagtctgaacatcaaagtgtggaatcagtccactccccccactatttacgtgaaaggaaaaaccgtaaatacggacaagacctggaaagtaacctacgaagacaaggaatggatagacgaaagcggaaaagccagtgatacttctgccaccgtttatatggatgcagggtgttggaactttgacggagccacccaactgccttccaagttttcattggccagaaaaccgatgaaagcagtttcctccactccccggaaagaaggggtattgtacgacttcggaaaagaaacctttggttatatcactctgaaagaggtaaagggaaaaggaacgatccatatctattacggtgaaagtcctgaagaagccttggatacggaatattgcgaaacattggacaaattgctggcagagccggggcagataaccgatctggccatccggaatacacggaaactatacgatgaatacacgttggacaacagcaaggccttccgttatgtctatgtcacttgcgatccgggagtaacgatacaggacgtttccatgcaatacgaatacctgcccgaagagtaccggggctcattcaaatgcaatgacgaagaactgaaccgcatctgggaagtaggagcatacaccatgcaccttactacccgtgaattctttatcgacggcatcaagcgcgaccgttgggtatggagtggcgatgccatccagagctacctgatgaactactatctgttcttcgataatgaaaccgtgaagcgtaccatctggctgcttcgcggaaaagaccctgtgaccagccacagcaataccattatggactacaccttctattggttcctcagtatttacgattactatatgtattccggtgacaaagactttgtaacccaactctatccgcgtatgcaaagcatgatggactatgtattgggacgcaccaatgccaacggtatggtggaaggcatgaccggtgactgggtattcgtagactgggcagacggttatctggacaagaaaggagaactctcctttgagcaagtcttgttctgcaaaagtttggaaaccatggcgctttgtgccggtctggccggcaatacggcagacaaaaccaagtatgagaaactggcttccgctttacgttccaagctggaacccgctttctggaatgagcagaaacaggcgatggtacacaaccgcgttcagggcaagcagagtgagtccgttacccgctacgccaatatgttctctgtcttcttcaattatctgaatgccgataaacagcagaccatcaaacacaccgtattgcagaatgacagtattttgaaaatcaccactccttatatgcgtttctatgaactggaagcactgtgcgccttgggcgaacaagaatcggtgatgaaagaaatgaaagcctattggggcggtatgttgaaagaaggagctaccagtttctgggagaaatacaatcccgaagaaacaggtacccggcatctggccatgtacggacgtccatacggcaaaagcctctgccatgcatggggagccagccccatctatttgctgggcaaatactatctgggagtaaaacccaccaaacccggttacgaggaatactccgtcaccccttgtctgggcggcttgaaatggatggaaggaaccgtgcccactccatacggcaatatccatatctatatggataagaaagagatccgtatcaagtccgacggcggaaagggagtgctgaacattccaacccggaaaggaatgaaagccatgaccatagaacccggagaagaacaagtcttcaaatactgatggaatagatcaaaaaaaaggtgatacctaccttcccaggcgggtatcaccaacactgtttcgtaagttcccgttatccgctgataacagtacttacctctgatctaacattagttttcttatgggcttccgcctgtatcactacattaggaagcggagattctacatcttggaaaaaagtatcttccaaaagcttcgctttttagtctcttctttattacctgaactttgataaatatcttcgtatccccatttgtcatggatcattctgtaaatcatcccccattcgggcagtcctcccagattacggtcatcaataaacaaatccgccttcagttttctggagtaatgattgctttccagggtttcttccgcataattgctgtttacggcataaaactccagtccacgctcccggcagaaatccacggcctcctgtaataatttaccttcccgcacactccacagaataaggcgatgccgttcctgttgtagttttttcagcgtttctatggcaaagggtagttccctgcctatttcgggatatttatgctccactattgtgccgtcaaagtcaactgctataatcattccttatgctttcgaaaattctttaatacactgctcctctgccagtctgcatatcagcagggttccctctttctcggctatgatatacccgtccagtccttgtattaccgcctgtttcaaatgcggtgtgtgtacaatgcagttattgcattcatacattcggacattctcgcctacaacggcattgttccgttcatctttgggcagcaaggaatgcaatgagccccagctacccagatcagaccatccgaactctgccggcaatacataaatccgttccgctttttccattacggcataatctatggatatactttcacaagcagggaacagctcttctatggtttctttctctctttcggtatagaactccggataaatcctgtcgaacacctcggcaatgcccggtgcataacggcgtatagcctcttctatggtctttacattccatacaaagatccctgcattccagaaataattcccggcgtccacatagtgccgtgccgttttcaagtccggtttctctttgaattcatccactttccgtatatcctgatccacctcttctcccgcggctatatatccgtatcccgtttccgggcggcaaggtctgatacctatggttacaatggccttgctttgatctgtcatcagcagtgccttggctatcacccggcggaattcatccgtattgataaccaatgcatccgcaggagtcactacgatattggcgtgcgggtggtgtttcttgattttccagcaagcgtatgtgatgcagggggccgtgttacgtgcaaccggctccgtcagtatatgatgaggcggcacggatggcaattgtttccttaccgtttccttatacttatccgaagtcactatccatatattatccggaatgcacaacccttgaaagcgttccactgtcagttgtatcaggcttttgccacatcccgtcacatcaatgaactgtttgggacattccggcgtactcatgggccagaagcggcttcctatgccgcctgccatgataacgatatgagtttccataacacgtatgctctttatttctttttatattccagataccattggtacatcttgtgcaccccttcctctatgtctattttgtgatgccatcccagttcatgcaatttggtcacatcagtcagtttgcgcatggttccgtccggtttctccggattgaatgtaatgctgcctttatatcccgtttcctttactatcagatgagccaggtcggcgatggatatttcctttcccgtgccgatgttgatgtggcagttgcgtatctcttttgtgccgggacggtaagtatctttaaagtccacatgctccatgatgaaaacactggcatccgccatctcctcactccataagaattcgcgcagcggcgtgcctgttccccacagttccaccccgtccttgctgatgccgtagtttttcaggacagccagtatctcctctgttctgctctccccgtttataccttccaccgggcgcatatccagatcatagcgtatgttctcccagtcaccctcattcaagcatttggcaagatgtattttcctgatcatggcaggcagcacatggctgcgttccaaatcaaagttatcattggggccatacaggttcgtaggcattacagcgatatagttggtaccatattgcaggttgaaactctcgcacattttcagccccgctattttggcgatggcgtatggctcattcgtatattccagtggggaggtgaggagagcatcctccttcatcggctgctgtgcatctctgggataaatgcaggtacttcccagaaacaataatttcttcactccgtgacggaagctttcccctatcacgttctgttgtatttgcaggttcttgtagataaagtccgccctgtatgtgctgtttgccatgatacctcccacgtgggcggcggcaaggattacatattccggtctttcttggtcaaagaagtcctttacggcaactccgtccagcaagtccagttccttgtggcttctgccggtcaggttggtgtagcccttttcttgcaggttacgccaaatagcggagcccacgagtccgtggtgccctgctatataaattttggctgatttctccattgaaattcttgactaatgatttaacagcttgctttgagatgaagtttcttcacgaatttcatatcgtgtttcaccatgattttcaccagttcctcgaatgaagtcttgcggggattccatcccagtaacgttttggctttggtaggatctcccagtaactgttccacctctgccgggcggaaatatttgggatccacctctaccagcaccttgcctgtagctgtgtcaatacctttctcgttcacaccttcaccttcccagcgcaagtcgatgcccgcttccttgaaagcaagggtagcaaattcgcgtacagtgtgatattctccggtggctataacaaagtcttcgggcgtatcgtgttgcagaatcagccacatacattccacatagtctttggcatatccccagtcgcgcagggagttcagattccccaagtacagtttatcttggaatccttgtgcgatgcgtgccgccgccagggtaattttccgggtaacaaaagtttcgccccggcgttcactttcgtgattgaacaaaataccgtttacggcaaacatgccatagctttcgcggtaatttttggttatccagaaaccatattgcttggctactccgtatggagaacggggatagaaaggagtagtctctttctgaggaacttcctgcaccagtccgaaaagttccgaagtagatgcctgataaatcttggttttcttttccagccccaatatacgtaccgcctccagcatgcgcagcgtacctaccgcatccgcttccgctgtgtattcgggcacgtcgaagcttacttttacatggctttgtgcggccagattataaatctcgtcaggttgtacggactgtatgatacgtatcagtgagctactgtccgtcatatccccccaatgcaggttcaccagtcggttctgcttcatatcccgtacccattcgtccagatacagatgttctatacgtgcagtgttaaatgaagaagaacgtctcaggataccatgtacttcgtatcctttttctatcaggaactcggccaggaacgaaccgtcctgtcctgtgatacctgaaatcaatgctacttttttactcatattttgtattattctagaaaaaatgttttataccatgacctgtcttcatgcatacttgcatttggaccggtataaataattcttattcttttttatttgcggcgtcaggttgtatcaggctctcttcctctgcttccggtatttcactccacggcagtctggcttcaatgaactgtggaatctttgaaagaattttgcctttcagtgccgagatgggttttatgccgtgacttttatacattctcaagtcctccgcccatttcagtttgctttttcccgcatcggtagaaagcccccccattctcattttcacgatgtatttgttcaggtaatatactttcaggtcggcttcatacagatagcgcaccagcaaatccgagtcggcggctatcttataactttcgtcgtaaagcccccatttatccatacactccttctttatatagacagtggggtggagtgggagccatccgtttttcacattctctttactgtatcgtccgcttatccagtttcgtatcatcaggttggtgtcgtcataatctacaaagaccccattgccgtatatcatatccgcatcttgttcctcgaatgttttcactatgtcggagatggtgtgagatgagaacaggaaatcatcggagtgaatcagaccgataatatctcctgttgctgcacgtattcctttgttgatcgcttcatacatacctttatccggctcggagataattgtatctatcccgtttttatattcattgatgacagccagcgagttatctttcgacgctccgtccaccacaatgtattctatgtaaggataatcctgttccagcacactttctattgctccacgaatggtggcttcccggttgtagcaggaagtgataattgaaactttcataatgttgatgcttttataatgtaatatttcttgttcgaatttttagtgcgggatttccttgataaattccgtatgcttccatatttttagtagcagtagacccaactgttagtattgcgtgcgatttaacttttattccggggcataccaccgtttttgcaccaatccatgcaccgtcttctattataatgggggcatttcggtaatcgaaagtggacagtgtataatcatggtttccggtaagtaataatgctccttgcgaaatgcatacattatttcctattatgacttcatcaagattatcaatccatgcgttttcccctaaccatacatcatttcctaatgtcagtttccaagggaattttatgttcacattattttttattactagtcctttccctatttttgcaccgaaaagttttagaaagaacacttttattcccataaaaggattccaggaagcacgtacaaataatgcgttgacaaaataccaaagagtttgttttataaatcctgctcctttattaaaatttcctgtgttgaaagaagataaatggacttctgtcattgctctaatattttttgaaatacattatccatattgtttatatattgctgttctgtatagttcgaatgagctatattataatttctttcgcatatgtttcttaatgaagaacgttctttatctaaacgcaatatataattgtatatctcttctaaattgatgttatttttatctataactagtccgtgttctttgtttgttgctatgtcggggatacctgcatggttggtggtgataatagccatagcatttcccattgcttctaatatggagataggttgtccttcatttggatagcgagtaagcaatataaatatattacataagtttaataagtcatttttctttttgcctgaaacgattccatgataggtgatggtgttttctagttgatgtttagttataaaattttcgaaatacatcctttctttttcttcgaaaaattttcctgcgaaatgaaaatgtagagtattcttttgctctgtttgtacttttgctgctaattccaatacttctttatatccttttgattctataaagttgcttagataaaggatatgtaatacaggttgtgaagccaataagtttattttttctttgtagctacaggcattcagcatatattcttcatcaacgcagttgggtacaacgaatattttttgttcatttatcattcctttgaaaatgctttttaaagagttacctaatacaatagtaccagatatacgacttatagctttatagtttaggcttctctgtaattgtccacagtctttttctatcaaaatgcgataatatcctccatgcaaatgaatcaaacattttctttttttccattgtaacaattttagtattagtagatctcgccaattccctccacgcgtttgtgctatggtaagatagtataagtcgcttgtattggttacaatcttccataatgtttttaagatctctttattgttagttagatttatttgttgaaagagatactttgactgtagtgcagaagtataaagagtttctacagcttttgataatccgtggatagggggcggaaattgagctatgaagcagatttttttcatccgtcgaataattttaatttattattttaagatgttcttctaccattttttcaatggtataactggctattttatgcaagttttgttgtgctatttcaactcgtaattcagaatcattcattagtttttccataatgctttttaattgttcggaattatctgtgtcaattaaacattctttatttgttattagttccatcccagctacgcatttgttagtggttattacaggtagtccatatgccatagattcatttataactaatccccaaatgtcttctcttgtagggtgtacaaatatatcagctgctttaaaatacatagctaattcttcttttgtcttaaatccttcaaaatgaatttgagttaggttattttctttttgtatttgtaaatactcttctgtgggtttcccacccacaatatagatgcctatatttttatccatagtacgtgcagcttgtaataagacatcaaatccttttctatggatgaactgaccaactgccaaaatcatttgaggttcttttatatttaatattttgcgaatggcatttttttcttgttgagataatggggcatttatgatatctttgtttcctagcgaactgaaagggtatctatagattgttgagttttctcctgcataaaagcgaatatattcgtctgttatttgactaggactaatatacgctttcgctccttttagaaaaaagcttttaaatatttttttggctttcccttcatgatatttagccatagcaccatctacttcataataatagggaatgttgcgcaatttaatagatagcagagcagccatttctgtaaaatatgcgtagtttgtgataaaaatcacatcatattttaactgttttatgtatttaaatatactccagtctatttttgtttcttggatttctccttcttttaaaaaaatggctttgaaattactgatagtattttctttccagttaaaagtgattcctggagcacgtttggcttcaaatatcacagttaattcacagtgttttcccaattcattataaaaatcaatacgataaggagcgggaatatttgtgatgaaaagtactttctttaatttttgttccataagtctatatagatttcttgaagtttttgagcttctgttttaatatcataaccagatgcttgtatgtcaaaatgcaaatccgttctaggtgtcttgtgtgtttctatatattcaattatttttttataccataattctttttttaagtctatgaaatctatgtcggtagatatttgtgtttcacgtgtaatttctgatgataggaatgtggggcagccattagcttgattttcaattgctacaactggtaatccttcaaataaagatggtagtacaaataaatcaaaagcgttatagaaaagatttacatcatccctaactcccgttaatataacatgttcttttaaatttaaagtacttattttttgtaggatggcttcttttaaatgcccttctccaataagtataagtttacttttaggtattgtcttatgtatttctgcaaaaacatctaaaaggaacatatgatttttttgtgtatcaaatcgtccaacatgtcctattaggaaattattttttatattgtatttttgccttatttgtctacgtgcttcgggattaaatttgaacatttcagcttctattgcgtttctgatgatctgaaaaggttggtctttaaataaccatttgcctgccatctcggagcaagccattcggtgagtggcatactgattgattttttttctagcttgttctaggaaaaatagttttatagggttatttgttaaatgtttagtgttatgactatgagcgattcgtacaggaataccacaattttgagctacctttagtacccacgctcccatggcatccatatgggtatgaataattttgtaattccctttttttagtattgtttttaacagagttgtataacttaaaggatgtttgcttttttgtggaagagtaaaaatttgtccccctaaatttttaatttcttcatcgtaatacccataacctccagcattatgtactacgaaatctatttgaattattttatggtcaaagtgacggtaatagttcatcatgtatgattctataccacctcggttcataagacctccgtttatgtataatattttaataggaaattgcataggatataaaattggatgtgatctatttgcggataatgagtttatataatttgttgataatttgaattgtaataactagttgattaaaaggtatataatgtattaatttgaaaaataatttgcggaaatgatgcatttttacagaatgttcgaaactaggattatattgcaaagctttattgtaatttacttgtgttccttgtatattcatgttaggaaatatttccatgccatgtattgtgtttatagttaagcaagatattccgtttttatcatataggttagggtatgtatttttaataccccaaaaatcggccaatgtgaagtcactaccacttttgaaacttttgtttttgcatacataacagcatgggcgtaaatatatgtcatgtataaatcctcttagatatggattctttcttaaagtttctgatagacttttctgttttttgtattgtaaaacaaaactaaaattttcccaacctagttttttgtttctgaaagaaatttgttttatatcgtttgtcttagcagttttatttaggtatattttccatattttagggcttggaaccccatggcaaacaaagtctacagttattaaattttcatagtcttttcgtaggaaaagttttagaccatggatttggcagggagttccaacaaacatgactatttttcccttttttagaaaattttctgtgtgaataaaagaaagtccaattttgctttgtacatatttactcattcgtaacttttctagaccactaatgctctcggtatatccgtgaataacattccagttatcatcgaatatagctccaaaaacaactcctcctttttgaataacccattcagcgattaatgagaaagctcctcctgatgaggattgtaattgtatttcttgatctggatgtttgatggcataaatatttattggttgtttggagtaggaagtgtttgtttggggacatactttgttgcatagaccacaattaatgcattgttctttatctataattggatactcaaaaccttcttcatcagattccattcttatgcattgttttggacatctttgaacacaggcataacatccacagcaatcttgtttatttgttatttggagcattcttttaaagctttttgtagaaaaaatgtagattcttttctttgtgtttgtaattttatatcgactatattccaattaatagtagatgtttgttggggtatatagttattggttattaatctattattgagtccaaacaatgatagtaaagattgaattcttgtatttccaccagcagaattacttattacataaaaatttttgtgaaaaaggatagaaaaaacacatccatgaaaagagtcagtaattattaaatcactatagtaaatagcagataaccatttttcaatgctattttgggtattgaaaaatttttttaggatattacgttcaacttttgctgttaacaattcaatatctttatgcaataaagaattgataatattttgattgcttggattgttataatctaataaataggtgaagcagtgttgttttttggttttgaatggtgattctattaatatttttttatagcattctgcttctaacaacattgtagggtcaagtacttgtattgcattgttgatctttaaaaattgagaacataactttattccagatgtttctcttacagatatatatgaaaattcatttattaaattttgagctgtatttgtttctatgtctgtaaaatcccaatggtcaatgccaaaagaagcagcatatgcaattttaggaatacaatttggaggaactgtttttaaaaaatatctatctacgtttttttttctattaatacccatatcaggacgccatacttgatcactccctaccactaatatatttatgttatttatgcttaattcatcatcgcaaaaaggttcatgaagttttaatagattgaagttttcttttacgaacttgtatatatttgatcttttatataacttttgttttaaaacttgttttatgttattgctaggctgttctataatgatcggttcaaatcctaagttttgtatagctttttgtaaagcaaatgcttgtaaaatacctccataattaaaatgaaaaggtaatgtgacaattccaactctcatcatttgtttaaaatattaagaatgttttcagcatataatttatgatatttttcccacgttaatttttgagctgtttcatatgcttctttagacatttgtggaatcatatcgcgatgttcaataaaccaatctaatgcgcttttaagagatgcttcggaagttgcttcatatacaagtccgtttttgtagttttcaattgcatcatctcctcctgcaaggtttgatataagaacaggagttcctgtacttaatgcttctagtacaaccataccatatccttcacctagtgtaggaaaaacgaacaagtcagcatcttgatacttttgtgctaaaatatcatgtgtaacaaaacctagaaaattgatattattaatgccatgatattgttttataatttcattgttttcattgaatgagcctgctaaatttatttcaatctcattagggctatattcttttataattttaagcaaatggtgcagaccttttctatatgatatctgccctacataaattaatttaagtgctttattattcgtgttttttttctctgtgaattgaaatttattgatgttgacaccgtatggaactatttttattttttttctatctataccacaaaattccaaacttttagttacaatattagaaggagaaaaaaagtaatcaacatattttaattcttcacgaattaccttttcgtattttatattccatagatatgcttcctctttataaaatccattgtggtgatagtttttcatatctttttcaaaattagctttcataaatggacgcattgaaattgaaacatccattattgttgtaatttgaggagcttgtgttttgatatatttaagaccttttctagaaataccatcgtatacaataattgcatctacgttctcttttattgcgatttgggctgctttatctgcgaaatgatttgataatgctatgtttaaatggaaatataattttgaaagaaaaggtaacttggatataagaagaactaacaatccccaccattcgtatatttgtatgacttcctcgtcctttagatatggacattttcttgtatttgctttttttaaatttttcccttttagtaaatgttttatcttatttgtgagagaattgtctttatcgtaaactgttgttacatatttgtaaaaaactcctgcttcttttaatgctttagctgtttcaaaagaatgctgtttccctgggtgtactaataataccttcattttttgctatctatttcctgttattattttgtaaataaa
